(19) United States
(12) Patent Application Publication
(10) Pub. No.: US 2023/0043648 A1
(43) Pub. Date: Feb. 9, 2023

(54) COMPOUNDS AND METHODS FOR MODULATING SCN1A EXPRESSION

(71) Applicant: Ionis Pharmaceuticals, Inc., Carlsbad, CA (US)

(72) Inventors: Paymaan Jafar-Nejad, Carlsbad, CA (US); Susan M. Freier, San Diego, CA (US); Frank Rigo, Carlsbad, CA (US)

(73) Assignee: Ionis Pharmaceuticals, Inc., Carlsbad, CA (US)

(21) Appl. No.: 17/802,324

(22) PCT Filed: Feb. 26, 2021
(86) PCT No.: PCT/US2021/019960

§ 371 Date: Aug. 25, 2022

Related U.S. Application Data
(60) Provisional application No. 63/085,111, filed on Sep. 29, 2020.
(60) Provisional application No. 62/983,555, filed on Feb. 28, 2020.

(51) Int. Cl. C12N 15/113; C07H 21/00; A61K 31/712; A61K 31/7115; A61K 31/7125

(52) U.S. Cl. CPC C12N 15/1138; C07H 21/00; A61K 31/712; A61K 31/7115; A61K 31/7125; C12N 2310/11; C12N 2310/315; C12N 2310/3341; C12N 2310/3527

(57) ABSTRACT

Provided are compounds, methods, and pharmaceutical compositions for modulating SCN1A RNA and/or protein in a cell or subject. Such compounds, methods, and pharmaceutical compositions are useful to ameliorate at least one symptom of a developmental or epileptic encephalopathic disease, such as Dravet Syndrome. Such symptoms include seizures, sudden unexpected death in epilepsy, status epilepticus, behavioral and developmental delays, movement and balance dysfunctions, orthopedic conditions, motor and cognitive dysfunctions, delayed language and speech issues, visual motor integration dysfunctions, visual perception dysfunctions, executive dysfunctions, growth and nutrition issues, sleeping difficulties, chronic infections, sensory integration disorders, and dysautonomia.

### SEQUENCE LISTING

[0001] The present application is being filed along with a Sequence Listing in electronic format. The Sequence Listing is provided as a file entitled BIOL0381WOSEQ_ST25.txt, created on Feb. 24, 2021, which is 624 KB in size. The information in the electronic format of the sequence listing is incorporated herein by reference in its entirety.

### FIELD

[0002] Provided are compounds, methods, and pharmaceutical compositions for modulating SCN1A RNA and/or protein in a cell or subject. Such compounds, methods, and pharmaceutical compositions are useful to ameliorate at least one symptom of a developmental or epileptic encephalopathic disease, such as, for example, Dravet Syndrome. Such symptoms include seizures, sudden unexpected death in epilepsy, status epilepticus, behavioral and developmental delays, movement and balance dysfunctions, orthopedic conditions, motor and cognitive dysfunctions, delayed language and speech issues, visual motor integration dysfunctions, visual perception dysfunctions, executive dysfunctions, growth and nutrition issues, sleeping difficulties, chronic infections, sensory integration disorders, and dysautonomia.

### BACKGROUND

[0003] The human gene SCN1A encodes human SCN1A protein, the alpha-1 subunit of the voltage-gated sodium channel NaV1.1. Mutations in SCN1A lead to developmental and epileptic encephalopathies (DEEs), including Dravet Syndrome (previously known as Severe Myoclonic Epilepsy of Infancy (SMEI)), one of the most severe childhood forms of epilepsy; other epileptic disorders, including, for example, Genetic Epilepsy with Febrile Seizures Plus (GEFS+) and other febrile seizures, Idiopathic/Generic Generalized Epilepsies (IGE/GGE), Temporal Lobe Epilepsy, Myoclonic Astatic Epilepsy (MAE), Lennox-Gastaut Syndrome, and Migrating Partial Epilepsy of Infancy (MMPSI); and familial hemiplegic migraines, with or without epilepsy (Harkin, L. A., et al., 2007, Brain 130, 843-852; Escayg, A., et al., 2010, Epilepsia 51, 1650-1658; Miller I. O, et al., 2007 Nov 29 [Updated 2019 Apr 18]. In: Adam M P, Ardinger H H, Pagon R A, et al., editors. GeneReviews® [Internet]. Seattle (Wash.): University of Washington, Seattle; 1993-2020. Available from: https://www.ncbi.nlm.nih.gov/books/NBK1318/).

[0004] DEEs are associated with SCN1A haploinsufficicncy (Parihar, R., et al., 2013, J. Human Genetics, 58, 573-580). Symptoms associated with DEEs, including Dravet Syndrome, include prolonged seizures (often lasting longer than 10 minutes), frequent seizures (for example, convulsive, myoclonic, absence, focal, obtundation status, and tonic seizures), sudden unexpected death in epilepsy, status epilepticus, behavioral and developmental delays, movement and balance dysfunctions, orthopedic conditions, motor and cognitive dysfunctions (for example, ataxia, tremors, dysarthria, pyramidal, and extrapyramidal signs), delayed language and speech issues, visual motor integration dysfunctions, visual perception dysfunctions, executive dysfunctions, growth and nutrition issues, sleeping difficulties, chronic infections, sensory integration disorders, and dysautonomia. Dravet Syndrome patients experience additional neurodevelopmental delays, leading to severe neurological disability (Guzzetta, F., 2011, Epilepsia 52:S2, 35-38; Anwar et al., 2019, Cureus 11, e5006).

[0005] Alternative splicing of SCN1A leads to multiple SCN1A transcript variants (Parihar, R., et al., 2013). Certain transcript variants include a nonsense-mediated decay-inducing exon (NIE) (Steward, C. A., et al., 2019, npj Genom. Med. 4, 31; Carvill et al., 2018, American J. Human Genetics, 103, 1022-1029). One such NIE (NIE-1), which is 64 nucleobases in length and located in SCN1A intron 20, causes degradation of the SCN1A transcript (Carvill et al., 2018).

[0006] Currently there remains a need for therapies to treat Dravet Syndrome, GEFS+, and other DEEs. It is therefore an object herein to provide compounds, methods, and pharmaceutical compositions for the treatment of such diseases.

### SUMMARY OF THE INVENTION

[0007] Provided herein are compounds, methods, and pharmaceutical compositions for modulating splicing of SCN1A RNA and/or protein in a cell or a subject. In certain embodiments, the amount of SCN1A RNA and/or SCN1A protein is increased. In certain embodiments, the amount of full-length SCN1A RNA and/or full-length SCN1A protein is increased. In certain embodiments, the amount of SCN1A RNA including an NIE is reduced. In certain embodiments, the amount of SCN1A RNA excluding an NIE is increased. In certain embodiments, the NIE is NIE-1. In certain embodiments, the subject has a developmental or epileptic encephalopathy (DEE). In certain embodiments, the DEE is caused by SCN1A haploinsufficiency. In certain embodiments, the DEE is treated by increasing the amount of full-length SCN1A RNA and/or full-length SCN1A protein in a subject, or cell thereof, with compounds capable of excluding an NIE from an SCN1A RNA. In certain embodiments, exclusion of an NIE from an SCN1A RNA increases full-length SCN1A RNA and/or full-length SCN1A protein wherein removal of the NIE prevents degradation of the SCN1A transcript via the NMD pathway. In certain embodiments, the subject has Dravet Syndrome. In certain embodiments, compounds useful for modulating splicing of SCN1A RNA are oligomeric compounds. In certain embodiments, the oligomeric compound comprises or consists of a modified oligonucleotide.

[0008] Also provided are methods useful for ameliorating at least one symptom of a DEE. In certain embodiments, the DEE is Dravet Syndrome. In certain embodiments, symptoms include prolonged seizures (often lasting longer than 10 minutes), frequent seizures (for example, convulsive, myoclonic, absence, focal, obtundation status, and tonic seizures), sudden unexpected death in epilepsy, status epilepticus, behavioral and developmental delays, movement and balance dysfunctions, orthopedic conditions, motor and cognitive dysfunctions (for example, ataxia, tremors, dysarthria, pyramidal, and extrapyramidal signs), delayed language and speech issues, visual motor integration dysfunctions, visual perception dysfunctions, executive dysfunctions, growth and nutrition issues, sleeping difficulties, chronic infections, sensory integration disorders, and dysautonomia. In certain embodiments, provided herein are modified oligonucleotides for treating Dravet Syndrome.

### DETAILED DESCRIPTION OF THE INVENTION

[0009] It is to be understood that both the foregoing general description and the following detailed description are exemplary and explanatory only and are not restrictive. Herein, the use of the singular includes the plural unless specifically stated otherwise. As used herein, the use of “or” means “and/or” unless stated otherwise. Furthermore, the use of the term “including” as well as other forms, such as “includes” and “included”, is not limiting. Also, terms such as “element” or “component” encompass both elements and components comprising one unit and elements and components that comprise more than one subunit, unless specifically stated otherwise.

[0010] The section headings used herein are for organizational purposes only and are not to be construed as limiting the subject matter described. All documents, or portions of documents, cited in this application, including, but not limited to, patents, patent applications, articles, books, and treatises, and GenBank and NCBI reference sequence records are hereby expressly incorporated-by-reference for the portions of the document discussed herein, as well as in their entirety.

### Definitions

[0011] Unless specific definitions are provided, the nomenclature used in connection with, and the procedures and techniques of, analytical chemistry, synthetic organic chemistry, and medicinal and pharmaceutical chemistry described herein are those well-known and commonly used in the art. Where permitted, all patents, applications, published applications and other publications and other data referred to throughout in the disclosure are incorporated by reference herein in their entirety.

[0012] Unless otherwise indicated, the following terms have the following meanings:

[0013] As used herein, “2′-deoxyribonucleoside” means a nucleoside comprising a 2′-H(H) deoxyribosyl sugar moiety. In certain embodiments, a 2′-deoxyribonucleoside is a 2′-β-D deoxyribonucleoside and comprises a 2′-β-D-deoxyribosyl sugar moiety, which has the β-D configuration as found in naturally occurring deoxyribonucleic acids (DNA). In certain embodiments, a 2′-deoxyribonucleoside may comprise a modified nucleobase or may comprise an RNA nucleobase (uracil).

[0014] As used herein, “2′-MOE” means a 2′-OCH₂CH₂OCH₃ group in place of the 2′—OH group of a ribosyl sugar moiety. A “2′-MOE sugar moiety” is a sugar moiety with a 2′-OCH₂CH₂OCH₃ group in place of the 2′-OH group of a ribosyl sugar moiety. Unless otherwise indicated, a 2′-MOE sugar moiety is in the β-D configuration. “MOE” means O-methoxyethyl.

[0015] As used herein, “2′-MOE nucleoside” means a nucleoside comprising a 2′-MOE sugar moiety.

[0016] As used herein, “2′-NMA” means a —O—CH₂—C(═O)—NH—CH₃ group in place of the 2′—OH group of a ribosyl sugar moiety. A “2′-NMA sugar moiety” is a sugar moiety with a 2′-O—CH₂—C(═O)—NH—CH₃ group in place of the 2′—OH group of a ribosyl sugar moiety. Unless otherwise indicated, a 2′-NMA sugar moiety is in the β-D configuration. “NMA” means O—N-methyl acetamide.

[0017] As used herein, “2′-NMA nucleoside” means a nucleoside comprising a 2′-NMA sugar moiety.

[0018] As used herein, “2′-OMe” means a 2′-OCH₃ group in place of the 2′-OH group of a ribosyl sugar moiety. A “2′-OMe sugar moiety” is a sugar moiety with a 2′-OCH₃ group in place of the 2′—OH group of a ribosyl sugar moiety. Unless otherwise indicated, a 2′-OMe sugar moiety is in the β-D configuration. “OMe” means O-methyl.

[0019] As used herein, “2′-OMe nucleoside” means a nucleoside comprising a 2′-OMe sugar moiety.

[0020] As used herein, “2′-substituted nucleoside” means a nucleoside comprising a 2′-substituted sugar moiety. As used herein, “2′-substituted” in reference to a sugar moiety means a sugar moiety comprising at least one 2′-substituent group other than H or OH.

[0021] As used herein, “5-methyl cytosine” means a cytosine modified with a methyl group attached to the 5 position. A 5-methyl cytosine is a modified nucleobase.

[0022] As used herein, “administering” means providing a pharmaceutical agent to a subject.

[0023] As used herein, “ameliorate” in reference to a treatment means improvement in at least one symptom relative to the same symptom in the absence of the treatment. In certain embodiments, amelioration is the reduction in the severity or frequency of a symptom, or the delayed onset or slowing of progression in the severity or frequency of a symptom. In certain embodiments, the symptom is prolonged seizures (often lasting longer than 10 minutes), frequent seizures (for example, convulsive, myoclonic, absence, focal, obtundation status, and tonic seizures), sudden unexpected death in epilepsy, status epilepticus, behavioral and developmental delays, movement and balance dysfunctions, orthopedic conditions, motor and cognitive dysfunctions (for example, ataxia, tremors, dysarthria, pyramidal, and extrapyramidal signs), delayed language and speech issues, visual motor integration dysfunctions, visual perception dysfunctions, executive dysfunctions, growth and nutrition issues, sleeping difficulties, chronic infections, sensory integration disorders, and dysautonomia.

[0024] As used herein, “antisense activity” means any detectable and/or measurable change attributable to the hybridization of an antisense compound to its target nucleic acid.

[0025] As used herein, “antisense compound” means an oligomeric compound or oligomeric duplex capable of achieving at least one antisense activity.

[0026] As used herein, “bicyclic nucleoside” or “BNA” means a nucleoside comprising a bicyclic sugar moiety.

[0027] As used herein, “bicyclic sugar” or “bicyclic sugar moiety” means a modified sugar moiety comprising two rings, wherein the second ring is formed via a bridge connecting two of the atoms in the first ring thereby forming a bicyclic structure. In certain embodiments, the first ring of the bicyclic sugar moiety is a furanosyl moiety. In certain embodiments, the furanosyl moiety is a ribosyl moiety. In certain embodiments, the bicyclic sugar moiety does not comprise a furanosyl moiety.

[0028] As used herein, “cerebrospinal fluid” or “CSF” means the fluid filling the space around the brain and spinal cord. “Artificial cerebrospinal fluid” or “aCSF” means a prepared or manufactured fluid that has certain properties of cerebrospinal fluid.

[0029] As used herein, “cEt” means a 4′ to 2′ bridge in place of the 2′OH— group of a ribosyl sugar moiety, wherein the bridge has the formula of 4′-CH(CH₃)—O-2′, and wherein the methyl group of the bridge is in the S configuration. A “cEt sugar moiety” is a bicyclic sugar moiety with a 4′ to 2′ bridge in place of the 2′OH— group of a ribosyl sugar moiety, wherein the bridge has the formula of 4′-CH(CH₃)—O-2′, and wherein the methyl group of the bridge is in the S configuration. “cEt” means constrained ethyl.

[0030] As used herein, “cEt nucleoside” means a nucleoside comprising a cEt sugar moiety.

[0031] As used herein, “chirally enriched population” means a plurality of molecules of identical molecular formula, wherein the number or percentage of molecules within the population that contain a particular stereochemical configuration at a particular chiral center is greater than the number or percentage of molecules expected to contain the same particular stereochemical configuration at the same particular chiral center within the population if the particular chiral center were stereorandom. Chirally enriched populations of molecules having multiple chiral centers within each molecule may contain one or more stereorandom chiral centers. In certain embodiments, the molecules are modified oligonucleotides. In certain embodiments, the molecules are compounds comprising modified oligonucleotides.

[0032] As used herein, “complementary” in reference to an oligonucleotide means that at least 70% of the nucleobases of the oligonucleotide or one or more portions thereof and the nucleobases of another nucleic acid or one or more portions thereof are capable of hydrogen bonding with one another when the nucleobase sequence of the oligonucleotide and the other nucleic acid are aligned in opposing directions. Complementary nucleobases means nucleobases that are capable of forming hydrogen bonds with one another. Complementary nucleobase pairs include adenine (A) with thymine (T), adenine (A) with uracil (U), cytosine (C) with guanine (G), and 5-methyl cytosine (^{m}C) with guanine (G). Complementary oligonucleotides and/or target nucleic acids need not have nucleobase complementarity at each nucleoside. Rather, some mismatches are tolerated. As used herein, “fully complementary” or “100% complementary” in reference to an oligonucleotide, or a portion thereof, means that the oligonucleotide, or portion thereof, is complementary to another oligonucleotide or target nucleic acid at each nucleobase of the shorter of the two oligonucleotides, or at each nucleoside if the oligonucleotides are the same length.

[0033] As used herein, “contiguous” in the context of an oligonucleotide refers to nucleosides, nucleobases, sugar moieties, or intemucleoside linkages that are immediately adjacent to each other. For example, “contiguous nucleobases” means nucleobases that are immediately adjacent to each other in a sequence.

[0034] As used herein, “hybridization” means the pairing or annealing of complementary oligonucleotides and/or nucleic acids. While not limited to a particular mechanism, the most common mechanism of hybridization involves hydrogen bonding, which may be Watson-Crick, Hoogsteen or reversed Hoogsteen hydrogen bonding, between complementary nucleobases.

[0035] As used herein, “internucleoside linkage” means the covalent linkage between contiguous nucleosides in an oligonucleotide. As used herein, “modified internucleoside linkage” means any internucleoside linkage other than a phosphodiester internucleoside linkage. “Phosphorothioate internucleoside linkage” is a modified internucleoside linkage in which one of the non-bridging oxygen atoms of a phosphodiester internucleoside linkage is replaced with a sulfur atom.

[0036] As used herein, “mismatch” or “non-complementary” means a nucleobase of a first oligonucleotide that is not complementary with the corresponding nucleobase of a second oligonucleotide or target nucleic acid when the first and second oligonucleotide are aligned.

[0037] As used herein, “motif” means the pattern of unmodified and/or modified sugar moieties, nucleobases, and/or internucleoside linkages, in an oligonucleotide.

[0038] As used herein, “nonsense-mediated decay-inducing exon (NIE)” is an exon, or a pseudo-exon, that, when included in an mRNA transcript can activate the nonsense-mediated decay (NMD) pathway. “NIE-1” is a 64 nucleobase in length NIE located in intron 20 (chr2:166863579-166864271, hg19; Carvill et al., 2018), which causes degradation of the SCN1A transcript. In certain embodiments, human NIE-1 has the nucleobase sequence of SEQ ID NO: 13. In certain embodiments, mouse NIE-1 has the nucleobase sequence of SEQ ID NO: 14.

[0039] As used herein, “non-bicyclic modified sugar moiety” means a modified sugar moiety that comprises a modification, such as a substituent, that does not form a bridge between two atoms of the sugar to form a second ring.

[0040] As used herein, “nucleobase” means an unmodified nucleobase or a modified nucleobase. As used herein an “unmodified nucleobase” is adenine (A), thymine (T), cytosine (C), uracil (U), or guanine (G). As used herein, a “modified nucleobase” is a group of atoms other than unmodified A, T, C, U, or G capable of pairing with at least one unmodified nucleobase. A “5-methyl cytosine” is a modified nucleobase. A universal base is a modified nucleobase that can pair with any one of the five unmodified nucleobases. As used herein, “nucleobase sequence” means the order of contiguous nucleobases in a nucleic acid or oligonucleotide independent of any sugar or internucleoside linkage modification.

[0041] As used herein, “nucleoside” means a compound comprising a nucleobase and a sugar moiety. The nucleobase and sugar moiety are each, independently, unmodified or modified. As used herein, “modified nucleoside” means a nucleoside comprising a modified nucleobase and/or a modified sugar moiety. “Linked nucleosides” are nucleosides that are connected in a contiguous sequence (i.e., no additional nucleosides are presented between those that are linked).

[0042] As used herein, “oligomeric compound” means an oligonucleotide and optionally one or more additional features, such as a conjugate group or terminal group. An oligomeric compound may be paired with a second oligomeric compound that is complementary to the first oligomeric compound or may be unpaired. A “singled-stranded oligomeric compound” is an unpaired oligomeric compound. The term “oligomeric duplex” means a duplex formed by two oligomeric compounds having complementary nucleobase sequences. Each oligomeric compound of an oligomeric duplex may be referred to as a “duplexed oligomenc compound.”

[0043] As used herein, “oligonucleotide” means a strand of linked nucleosides connected via internucleoside linkages, wherein each nucleoside and internucleoside linkage may be modified or unmodified. Unless otherwise indicated, oligonucleotides consist of 8-50 linked nucleosides. As used herein, “modified oligonucleotide” means an oligonucleotide, wherein at least one nucleoside or intemucleoside linkage is modified. As used herein, “unmodified oligonucleotide” means an oligonucleotide that does not comprise any nucleoside modifications or intemucleoside modifications.

[0044] As used herein, “pharmaceutical composition” means a mixture of substances suitable for administering to a subject. For example, a pharmaceutical composition may comprise an oligomeric compound and a sterile aqueous solution.

[0045] As used herein, “pharmaceutically acceptable carrier or diluent” means any substance suitable for use in administering to a subject. Certain such carriers enable pharmaceutical compositions to be formulated as, for example, tablets, pills, dragees, capsules, liquids, gels, syrups, slurries, suspension, and lozenges for the oral ingestion by a subject. In certain embodiments, a pharmaceutically acceptable carrier or diluent is sterile water, sterile saline, sterile buffer solution, or sterile artificial cerebrospinal fluid.

[0046] As used herein, “pharmaceutically acceptable salts” means physiologically and pharmaceutically acceptable salts of compounds. Pharmaceutically acceptable salts retain the desired biological activity of the parent compound and do not impart undesired toxicological effects thereto.

[0047] As used herein, “RNA” means an RNA transcript and includes pre-mRNA and mature mRNA unless otherwise specified.

[0048] As used herein, “stereorandom chiral center” in the context of a population of molecules of identical molecular formula means a chiral center having a random stereochemical configuration. For example, in a population of molecules comprising a stereorandom chiral center, the number of molecules having the (S) configuration of the stereorandom chiral center may be but is not necessarily the same as the number of molecules having the (R) configuration of the stereorandom chiral center. The stereochemical configuration of a chiral center is considered random when it is the result of a synthetic method that is not designed to control the stereochemical configuration. In certain embodiments, a stereorandom chiral center is a stereorandom phosphorothioate intemucleoside linkage.

[0049] As used herein, “subject” means a human or non-human animal.

[0050] As used herein, “sugar moiety” means an unmodified sugar moiety or a modified sugar moiety. As used herein, “unmodified sugar moiety” means a 2′-OH(H) β-D ribosyl moiety, as found in RNA (an “unmodified RNA sugar moiety”), or a 2′-H(H) β-D deoxyribosyl moiety, as found in DNA (an “unmodified DNA sugar moiety”). Unmodified sugar moieties have one hydrogen at each of the 1′, 3′, and 4′ positions, an oxygen at the 3′ position, and two hydrogens at the 5′ position. As used herein, “modified sugar moiety” or “modified sugar” means a modified furanosyl sugar moiety or a sugar surrogate.

[0051] As used herein, “sugar surrogate” means a modified sugar moiety having other than a furanosyl moiety that can link a nucleobase to another group, such as an intemucleoside linkage, conjugate group, or terminal group in an oligonucleotide. Modified nucleosides comprising sugar surrogates can be incorporated into one or more positions within an oligonucleotide and such oligonucleotides are capable of hybridizing to complementary oligomeric compounds or target nucleic acids.

[0052] As used herein, “standard in vitro assay” means the assay described in Example 1 and reasonable variations thereof.

[0053] As used herein, “standard in vivo assay” means the assay described in Example 9 and reasonable variations thereof.

[0054] As used herein, “symptom” means any physical feature or test result that indicates the existence or extent of a disease or disorder. In certain embodiments, a symptom is apparent to a subject or to a medical professional examining or testing the subject.

[0055] As used herein, “target nucleic acid” means a nucleic acid that an antisense compound is designed to affect.

[0056] As used herein, “target region” means a portion of a target nucleic acid to which an oligomeric compound is designed to hybridize.

[0057] As used herein, “terminal group” means a chemical group or group of atoms that is covalently linked to a terminus of an oligonucleotide.

[0058] As used herein, “therapeutically effective amount” means an amount of a pharmaceutical agent that provides a therapeutic benefit to a subject. For example, a therapeutically effective amount improves a symptom of a disease.

### CERTAIN EMBODIMENTS

[0059] The present disclosure provides the following non-limiting numbered embodiments:

[0060] Embodiment 1. An oligomeric compound comprising a modified oligonucleotide consisting of 12 to 30 linked nucleosides wherein the nucleobase sequence of the modified oligonucleotide is at least 85% complementary to an equal length portion of a SCN1A nucleic acid, and wherein the modified oligonucleotide comprises at least one modification selected from a modified sugar moiety and a modified internucleoside linkage.

[0061] Embodiment 2. An oligomeric compound comprising a modified oligonucleotide consisting of 12 to 30 linked nucleosides and having a nucleobase sequence comprising at least 12, at least 13, at least 14, at least 15, at least 16, at least 17, or 18 contiguous nucleobases of any of the nucleobase sequences of SEQ ID NOs 41-889, wherein the modified oligonucleotide comprises at least one modification selected from a modified sugar moiety and a modified intemucleoside linkage.

[0062] Embodiment 3. The oligomeric compound of embodiment 1 or embodiment 2, wherein the modified oligonucleotide has a nucleobase sequence that is at least 90%, 95%, or 100% complementary to the nucleobase sequence of SEQ ID NO: 1 or SEQ ID NO: 2 when measured across the entire nucleobase sequence of the modified oligonucleotide.

[0063] Embodiment 4. The oligomeric compound of any of embodiments 1-3, wherein the modified oligonucleotide has a nucleobase sequence comprising a portion of at least 8, at least 9, at least 10, at least 11, at least 12, at least 13, at least 14, at least 15, at least 16, at least 17, or at least 18 contiguous nucleobases, wherein the portion is complementary to SEQ ID NO: 13.

[0064] Embodiment 5. The oligomeric compound of any of embodiments 1-4 wherein the modified oligonucleotide comprises at least one modified sugar moiety.

[0065] Embodiment 6. The oligomeric compound of embodiment 5, wherein the modified oligonucleotide comprises at least one bicyclic sugar moiety.

[0066] Embodiment 7. The oligomeric compound of embodiment 6, wherein the bicyclic sugar moiety has a 4′-2′ bridge, wherein the 4′-2′ bridge is selected from —CH₂—O—; and —CH(CH₃)—O—.

[0067] Embodiment 8. The oligomeric compound of any of embodiments 5-7, wherein the modified oligonucleotide comprises at least one non-bicyclic modified sugar moiety.

[0068] Embodiment 9. The oligomeric compound of embodiment 8, wherein the non-bicyclic modified sugar moiety is any of a 2′-MOE sugar moiety, a 2′-NMA sugar moiety, a 2′-OMe sugar moiety, or a 2′-F sugar moiety.

[0069] Embodiment 10. The oligomeric compound any of embodiments 5-9, wherein the modified oligonucleotide comprises at least one sugar surrogate.

[0070] Embodiment 11. The oligomeric compound of embodiment 10, wherein the sugar surrogate is any of morpholino, modified morpholino, PNA, THP, and F-HNA.

[0071] Embodiment 12. The oligomeric compound of embodiment 5, wherein each nucleoside of the modified oligonucleotide comprises a modified sugar moiety.

[0072] Embodiment 13. The oligomeric compound of embodiment 12, wherein each modified sugar moiety is a 2′-MOE sugar moiety.

[0073] Embodiment 14. The oligomeric compound of embodiment 12, wherein each modified sugar moiety is a 2′-NMA sugar moiety.

[0074] Embodiment 15. The oligomeric compound of any of embodiments 1-14, wherein the modified oligonucleotide comprises at least one modified internucleoside linkage.

[0075] Embodiment 16. The oligomeric compound of any of embodiments 1-14, wherein each internucleoside linkage of the modified oligonucleotide is a modified internucleoside linkage.

[0076] Embodiment 17. The oligomeric compound of embodiment 15 or embodiment 16, wherein at least one modified internucleoside linkage is a phosphorothioate internucleoside linkage.

[0077] Embodiment 18. The oligomeric compound of embodiment 15 or embodiment 17 wherein the modified oligonucleotide comprises at least one phosphodiester internucleoside linkage.

[0078] Embodiment 19. The oligomeric compound of any of embodiments 15, 17, or 18, wherein each internucleoside linkage is independently selected from a phosphodiester internucleoside linkage and a phosphorothioate internucleoside linkage.

[0079] Embodiment 20. The oligomeric compound of embodiment 16, wherein each internucleoside linkage is a phosphorothioate internucleoside linkage.

[0080] Embodiment 21. The oligomeric compound of any of embodiments 1-20, wherein the modified oligonucleotide comprises at least one modified nucleobase.

[0081] Embodiment 22. The oligomeric compound of embodiment 21, wherein the modified nucleobase is a 5-methyl cytosine.

[0082] Embodiment 23. The oligomeric compound of any of embodiments 1-22, wherein the modified oligonucleotide consists of 12-22, 12-20, 14-20, 15-25, 16-20, 18-22 or 18-20 linked nucleosides.

[0083] Embodiment 24. The oligomeric compound of any of embodiments 1-23, wherein the modified oligonucleotide consists of 16, 17, or 18 linked nucleosides.

[0084] Embodiment 25. An oligomeric compound comprising a modified oligonucleotide according to the following chemical notation: Aₙₛ Gₙₛ Tₙₛ Tₙₛ Gₙₛ Gₙₛ Aₙₛ Gₙₛ ^{m}Cₙₛ Aₙₛ Aₙₛ Gₙₛ Aₙₛ Tₙₛ Tₙₛ Aₙₛ Tₙₛ ^{m}Cₙ (SEQ ID NO: 41), wherein,
[0085] A=an adenine nucleobase,
[0086] ^{m}C=a 5-methyl cytosine nucleobase,
[0087] G=a guanine nucleobase,
[0088] T=a thymine nucleobase,
[0089] n=a 2′-NMA sugar moiety, and
[0090] s=a phosphorothioate internucleoside linkage.

[0091] Embodiment 26. An oligomeric compound comprising a modified oligonucleotide according to any one of the following chemical notations (5′ to 3′):

i)
(SEQ ID NO: 41)
AₑₛGₑₒTₑₒTₑₛGₑₛGₑₛAₑₛGₑₛ^{m}CₑₛAₑₛAₑₛGₑₛAₑₛTₑₛTₑₛAₑₛTₑₛ^{m}Cₑ;
ii)
(SEQ ID NO: 41)
AₑₛGₑₒTₑₛTₑₒGₑₛGₑₛAₑₛGₑₛ^{m}CₑₛAₑₛAₑₛGₑₛAₑₛTₑₛTₑₛAₑₛTₑₛ^{m}Cₑ;
iii)
(SEQ ID NO: 41)
AₑₛGₑₒTₑₛTₑₛGₑₛGₑₒAₑₛGₑₛ^{m}CₑₛAₑₛAₑₛGₑₛAₑₛTₑₛTₑₛAₑₛTₑₛ^{m}Cₑ;
iv)
(SEQ ID NO: 41)
AₑₛGₑₒTₑₛTₑₛGₑₛGₑₛAₑₛGₑₒ^{m}CₑₛAₑₛAₑₛGₑₛAₑₛTₑₛTₑₛAₑₛTₑₛ^{m}Cₑ;
v)
(SEQ ID NO: 41)
AₑₛGₑₛTₑₛTₑₒGₑₒGₑₛAₑₛGₑₛ^{m}CₑₛAₑₛAₑₛGₑₛAₑₛTₑₛTₑₛAₑₛTₑₛ^{m}Cₑ;
vi)
(SEQ ID NO: 41)
AₑₛGₑₛTₑₛTₑₛGₑₛGₑₛAₑₛGₑₒ^{m}CₑₒAₑₛAₑₛGₑₛAₑₛTₑₛTₑₛAₑₛTₑₛ^{m}Cₑ;
vii)
(SEQ ID NO: 41)
AₑₛGₑₛTₑₛTₑₛGₑₛGₑₛAₑₛGₑₛ^{m}CₑₛAₑₒAₑₒGₑₛAₑₛTₑₛTₑₛAₑₛTₑₛ^{m}Cₑ;
viii)
(SEQ ID NO: 41)
AₑₛGₑₛTₑₛTₑₛGₑₛGₑₛAₑₛGₑₛ^{m}CₑₛAₑₛAₑₛGₑₒAₑₒTₑₛTₑₛAₑₛTₑₛ^{m}Cₑ;
ix)
(SEQ ID NO: 41)
AₑₛGₑₒTₑₛTₑₛGₑₛGₑₛAₑₛGₑₛ^{m}CₑₛAₑₒAₑₛGₑₛAₑₛTₑₛTₑₛAₑₛTₑₛ^{m}Cₑ;
x)
(SEQ ID NO: 41)
AₑₛGₑₒTₑₛTₑₛGₑₛGₑₛAₑₛGₑₛ^{m}CₑₛAₑₛAₑₛGₑₒAₑₛTₑₛTₑₛAₑₛTₑₛ^{m}Cₑ;
xi)
(SEQ ID NO: 41)
AₑₛGₑₒTₑₛTₑₛGₑₛGₑₛAₑₛGₑₛ^{m}CₑₛAₑₛAₑₛGₑₛAₑₛTₑₛTₑₒAₑₛTₑₛ^{m}Cₑ;
xii)
(SEQ ID NO: 41)
AₑₛGₑₛTₑₒTₑₛGₑₛGₑₛAₑₛGₑₛ^{m}CₑₛAₑₛAₑₛGₑₛAₑₛTₑₛTₑₒAₑₛTₑₛ^{m}Cₑ;
xiii)
(SEQ ID NO: 41)
AₑₛGₑₛTₑₛTₑₛGₑₒGₑₛAₑₛGₑₛ^{m}CₑₛAₑₛAₑₛGₑₛAₑₛTₑₛTₑₒAₑₛTₑₛ^{m}Cₑ;
xiv)
(SEQ ID NO: 41)
AₑₛGₑₛTₑₛTₑₛGₑₛGₑₒAₑₒGₑₛ^{m}CₑₛAₑₛAₑₛGₑₛAₑₛTₑₛTₑₛAₑₛTₑₛ^{m}Cₑ;
xv)
(SEQ ID NO: 41)
AₑₛGₑₛTₑₛTₑₛGₑₛGₑₛAₑₒGₑₛ^{m}CₑₛAₑₛAₑₛGₑₛAₑₛTₑₛTₑₒAₑₛTₑₛ^{m}Cₑ;
xvi)
(SEQ ID NO: 41)
AₑₛGₑₛTₑₛTₑₛGₑₛGₑₛAₑₛGₑₛ^{m}CₑₒAₑₛAₑₛGₑₛAₑₛTₑₒTₑₛAₑₛTₑₛ^{m}Cₑ;
xvii)
(SEQ ID NO: 41)
AₑₛGₑₛTₑₛTₑₛGₑₛGₑₛAₑₛGₑₛ^{m}CₑₒAₑₛAₑₛGₑₛAₑₛTₑₛTₑₒAₑₛTₑₛ^{m}Cₑ;
xviii)
(SEQ ID NO: 41)
AₑₛGₑₛTₑₛTₑₛGₑₛGₑₛAₑₛGₑₛ^{m}CₑₛAₑₛAₑₒGₑₛAₑₛTₑₛTₑₒAₑₒTₑₛ^{m}Cₑ;
xix)
(SEQ ID NO: 41)
AₑₛGₑₛTₑₛTₑₛGₑₛGₑₛAₑₛGₑₛ^{m}CₑₛAₑₛAₑₛGₑₒAₑₛTₑₒTₑₛAₑₛTₑₛ^{m}Cₑ;
xx)
(SEQ ID NO: 41)
AₑₛGₑₛTₑₛTₑₛGₑₛGₑₛAₑₛGₑₛ^{m}CₑₛAₑₛAₑₛGₑₛAₑₒTₑₛTₑₒAₑₛTₑₛ^{m}Cₑ;
xxi)
(SEQ ID NO: 41)
AₑₛGₑₛTₑₛTₑₛGₑₛGₑₛAₑₛGₑₛ^{m}CₑₛAₑₛAₑₛGₑₛAₑₛTₑₒTₑₒAₑₛTₑₛ^{m}Cₑ;
xxii)
(SEQ ID NO: 890)
AₑₒAₑₛGₑₛTₑₛTₑₛGₑₛGₑₛAₑₛGₑₛ^{m}CₑₛAₑₛAₑₛGₑₛAₑₛTₑₛTₑₛAₑₛTₑₛ^{m}Cₑₒ^{m}Cₑ;
xxiii)
(SEQ ID NO: 891)
AₑₛGₑₛTₑₛTₑₛGₑₛGₑₛAₑₛGₑₛ^{m}CₑₛAₑₛAₑₛGₑₛAₑₛTₑₛTₑₛAₑₛTₑₛ^{m}Cₑₒ^{m}Cₑ;
xxiv)
(SEQ ID NO: 892)
AₑₒAₑₛGₑₛTₑₛTₑₛGₑₛGₑₛAₑₛGₑₛ^{m}CₑₛAₑₛAₑₛGₑₛAₑₛTₑₛTₑₛAₑₛTₑₛ^{m}Cₑ;
xxv)
(SEQ ID NO: 881)
GₙₛGₙₛTₙₛAₙₛGₙₛ^{m}CₙₛAₙₛAₙₛAₙₛAₙₛGₙₛGₙₛGₙₛGₙₛTₙₛAₙₛAₙₛTₙ;
xxvi)
(SEQ ID NO: 885)
AₙₛGₙₛ^{m}CₙₛAₙₛAₙₛAₙₛAₙₛGₙₛGₙₛGₙₛGₙₛTₙₛAₙₛAₙₛTₙₛAₙₛ^{m}CₙₛAₙ;
xxvii)
(SEQ ID NO: 888)
Gₙₛ^{m}CₙₛAₙₛAₙₛAₙₛAₙₛGₙₛGₙₛGₙₛGₙₛTₙₛAₙₛAₙₛTₙₛAₙₛ^{m}CₙₛAₙₛGₙ;
xxviii)
(SEQ ID NO: 882)
^{m}CₙₛAₙₛAₙₛAₙₛAₙₛGₙₛGₙₛGₙₛGₙₛTₙₛAₙₛAₙₛTₙₛAₙₛ^{m}CₙₛAₙₛGₙₛTₙ;
xxix)
(SEQ ID NO: 880)
AₙₛAₙₛAₙₛGₙₛGₙₛGₙₛGₙₛTₙₛAₙₛAₙₛTₙₛAₙₛ^{m}CₙₛAₙₛGₙₛTₙₛAₙₛ^{m}Cₙ;
xxx)
(SEQ ID NO: 883)
AₙₛAₙₛGₙₛGₙₛGₙₛGₙₛTₙₛAₙₛAₙₛTₙₛAₙₛ^{m}CₙₛAₙₛGₙₛTₙₛAₙₛ^{m}Cₙₛ^{m}Cₙ;
xxxi)
(SEQ ID NO: 511)
GₙₛTₙₛAₙₛAₙₛTₙₛAₙₛ^{m}CₙₛAₙₛGₙₛTₙₛAₙₛ^{m}Cₙₛ^{m}Cₙₛ^{m}CₙₛAₙₛTₙₛAₙₛAₙ;
xxxii)
(SEQ ID NO: 750)
TₙₛAₙₛAₙₛTₙₛAₙₛ^{m}CₙₛAₙₛGₙₛTₙₛAₙₛ^{m}Cₙₛ^{m}Cₙₛ^{m}CₙₛAₙₛTₙₛAₙₛAₙₛTₙ;
xxxiii)
(SEQ ID NO: 736)
AₙₛAₙₛTₙₛAₙₛ^{m}CₙₛAₙₛGₙₛTₙₛAₙₛ^{m}Cₙₛ^{m}Cₙₛ^{m}CₙₛAₙₛTₙₛAₙₛAₙₛTₙₛAₙ;
xxxiv)
(SEQ ID NO: 642)
AₙₛTₙₛAₙₛ^{m}CₙₛAₙₛGₙₛTₙₛAₙₛ^{m}Cₙₛ^{m}Cₙₛ^{m}CₙₛAₙₛTₙₛAₙₛAₙₛTₙₛAₙₛAₙ;
xxxv)
(SEQ ID NO: 519)
TₙₛAₙₛ^{m}CₙₛAₙₛGₙₛTₙₛAₙₛ^{m}Cₙₛ^{m}Cₙₛ^{m}CₙₛAₙₛTₙₛAₙₛAₙₛTₙₛAₙₛAₙₛAₙ;
xxxvi)
(SEQ ID NO: 741)
Aₙₛ^{m}CₙₛAₙₛGₙₛTₙₛAₙₛ^{m}Cₙₛ^{m}Cₙₛ^{m}CₙₛAₙₛTₙₛAₙₛAₙₛTₙₛAₙₛAₙₛAₙₛGₙ;
xxxvii)
(SEQ ID NO: 664)
^{m}Cₙₛ^{m}Cₙₛ^{m}CₙₛAₙₛTₙₛ^{m}Cₙₛ^{m}CₙₛAₙₛAₙₛGₙₛTₙₛTₙₛGₙₛGₙₛAₙₛGₙₛ^{m}CₙₛAₙ;
xxxviii)
(SEQ ID NO: 645)
^{m}Cₙₛ^{m}CₙₛAₙₛTₙₛ^{m}Cₙₛ^{m}CₙₛAₙₛAₙₛGₙₛTₙₛTₙₛGₙₛGₙₛAₙₛGₙₛ^{m}CₙₛAₙₛAₙ;
xxxix)
(SEQ ID NO: 550)
^{m}CₙₛAₙₛTₙₛ^{m}Cₙₛ^{m}CₙₛAₙₛAₙₛGₙₛTₙₛTₙₛGₙₛGₙₛAₙₛGₙₛ^{m}CₙₛAₙₛAₙₛGₙ;
xl)
(SEQ ID NO: 814)
AₙₛTₙₛ^{m}Cₙₛ^{m}CₙₛAₙₛAₙₛGₙₛTₙₛTₙₛGₙₛGₙₛAₙₛGₙₛ^{m}CₙₛAₙₛAₙₛGₙₛAₙ;
xli)
(SEQ ID NO: 692)
Tₙₛ^{m}Cₙₛ^{m}CₙₛAₙₛAₙₛGₙₛTₙₛTₙₛGₙₛGₙₛAₙₛGₙₛ^{m}CₙₛAₙₛAₙₛGₙₛAₙₛTₙ;
xlii)
(SEQ ID NO: 587)
^{m}Cₙₛ^{m}CₙₛAₙₛAₙₛGₙₛTₙₛTₙₛGₙₛGₙₛAₙₛGₙₛ^{m}CₙₛAₙₛAₙₛGₙₛAₙₛTₙₛTₙ;
xliii)
(SEQ ID NO: 523)
^{m}CₙₛAₙₛAₙₛGₙₛTₙₛTₙₛGₙₛGₙₛAₙₛGₙₛ^{m}CₙₛAₙₛAₙₛGₙₛAₙₛTₙₛTₙₛAₙ;
xliv)
(SEQ ID NO: 778)
AₙₛAₙₛGₙₛTₙₛTₙₛGₙₛGₙₛAₙₛGₙₛ^{m}CₙₛAₙₛAₙₛGₙₛAₙₛTₙₛTₙₛAₙₛTₙ;
xlv)
(SEQ ID NO: 510)
TₙₛTₙₛGₙₛGₙₛAₙₛGₙₛ^{m}CₙₛAₙₛAₙₛGₙₛAₙₛTₙₛTₙₛAₙₛTₙₛ^{m}Cₙₛ^{m}CₙₛTₙ;
xlvi)
(SEQ ID NO: 816)
TₙₛGₙₛGₙₛAₙₛGₙₛ^{m}CₙₛAₙₛAₙₛGₙₛAₙₛTₙₛTₙₛAₙₛTₙₛ^{m}Cₙₛ^{m}CₙₛTₙₛAₙ;
xlvii)
(SEQ ID NO: 696)
GₙₛGₙₛAₙₛGₙₛ^{m}CₙₛAₙₛAₙₛGₙₛAₙₛTₙₛTₙₛAₙₛTₙₛ^{m}Cₙₛ^{m}CₙₛTₙₛAₙₛTₙ;
or
xlviii)
(SEQ ID NO: 590)
GₙₛAₙₛGₙₛ^{m}CₙₛAₙₛAₙₛGₙₛAₙₛTₙₛTₙₛAₙₛTₙₛ^{m}Cₙₛ^{m}CₙₛTₙₛAₙₛTₙₛAn,

wherein,
[0092] A=an adenine nucleobase,
[0093] ^{m}C=a 5-methyl cytosine nucleobase,
[0094] G=a guanine nucleobase,
[0095] T=a thymine nucleobase,
[0096] e=a 2′-MOE sugar moiety,
[0097] n=a 2′-NMA sugar moiety.
[0098] o=a phosphodiester intemucleoside linkage, and
[0099] s=a phosphorothioate intemucleoside linkage.

[0100] Embodiment 27. The oligomeric compound of any of embodiments 1-26, wherein the oligomeric compound is a singled-stranded oligomeric compound.

[0101] Embodiment 28. The oligomeric compound of any of embodiments 1-27 consisting of the modified oligonucleotide.

[0102] Embodiment 29. The oligomeric compound of any of embodiments 1-28 comprising a conjugate moiety comprising a conjugate group and a conjugate linker.

[0103] Embodiment 30. The oligomeric compound of embodiment 29, wherein the conjugate group comprises a GalNAc cluster comprising 1-3 GalNAc ligands.

[0104] Embodiment 31. The oligomeric compound of embodiment 29 or embodiment 30, wherein the conjugate linker consists of a single bond.

[0105] Embodiment 32. The oligomeric compound of embodiment 29, wherein the conjugate linker is cleavable.

[0106] Embodiment 33. The oligomeric compound of embodiment 29, wherein the conjugate linker comprises 1-3 linker-nucleosides.

[0107] Embodiment 34. The oligomeric compound of any of embodiments 29-33, wherein the conjugate group is attached to the modified oligonucleotide at the 5′-end of the modified oligonucleotide.

[0108] Embodiment 35. The oligomeric compound of any of embodiments 29-33, wherein the conjugate group is attached to the modified oligonucleotide at the 3′-end of the modified oligonucleotide.

[0109] Embodiment 36. The oligomeric compound of any of embodiments 1-27 or 29-35 comprising a terminal group.

[0110] Embodiment 37. The oligomeric compound of any of embodiments 1-32 or 34-35, wherein the oligomeric compound does not comprise linker-nucleosides.

[0111] Embodiment 38. A modified oligonucleotide according to the following chemical structure:

[chemical structure]

(SEQ ID NO: 41) or a salt thereof.

[0112] Embodiment 39. The modified oligonucleotide of embodiment 38, which is the sodium salt or the potassium salt.

[0113] Embodiment 40. A modified oligonucleotide according to the following chemical structure:

[chemical structure]

### (SEQ ID NO: 41).

[0114] Embodiment 41. A chirally enriched population of modified oligonucleotides of any of embodiments 38-40, wherein the population is enriched for modified oligonucleotides comprising at least one particular phosphorothioate internucleoside linkage having a particular stereochemical configuration.

[0115] Embodiment 42. The chirally enriched population of embodiment 41, wherein the population is enriched for modified oligonucleotides comprising at least one particular phosphorothioate internucleoside linkage having the (Sp) configuration.

[0116] Embodiment 43. The chirally enriched population of embodiment 41, wherein the population is enriched for modified oligonucleotides comprising at least one particular phosphorothioate internucleoside linkage having the (Rp) configuration.

[0117] Embodiment 44. The chirally enriched population of embodiment 41, wherein the population is enriched for modified oligonucleotides having a particular, independently selected stereochemical configuration at each phosphorothioate intemucleoside linkage.

[0118] Embodiment 45. The chirally enriched population of embodiment 44, wherein the population is enriched for modified oligonucleotides having the (Sp) configuration at each phosphorothioate internucleoside linkage or for modified oligonucleotides having the (Rp) configuration at each phosphorothioate intemucleoside linkage.

[0119] Embodiment 46. The chirally enriched population of embodiment 44, wherein the population is enriched for modified oligonucleotides having the (Rp) configuration at one particular phosphorothioate intemucleoside linkage and the (Sp) configuration at each of the remaining phosphorothioate intemucleoside linkages.

[0120] Embodiment 47. The chirally enriched population of embodiment 44, wherein the population is enriched for modified oligonucleotides having at least 3 contiguous phosphorothioate internucleoside linkages in the Sp, Sp, and Rp configurations, in the 5′ to 3′ direction.

[0121] Embodiment 48. A population of modified oligonucleotides of any of embodiments 38-40, wherein all of the phosphorothioate intemucleoside linkages of the modified oligonucleotide are stereorandom.

[0122] Embodiment 49. A pharmaceutical composition comprising the oligomeric compound of any of embodiments 1-37, the modified oligonucleotide of any of embodiments 38-40, the chirally-enriched population of any of embodiments 41-47, or the population of modified oligonucleotides of embodiment 48, and a pharmaceutically acceptable diluent or carrier.

[0123] Embodiment 50. The pharmaceutical composition of embodiment 49, comprising a pharmaceutically acceptable diluent and wherein the pharmaceutically acceptable diluent is artificial CSF (aCSF) or PBS.

[0124] Embodiment 51. The pharmaceutical composition of embodiment 50, wherein the pharmaceutical composition consists essentially of the modified oligonucleotide and artificial CSF (aCSF).

[0125] Embodiment 52. The pharmaceutical composition of embodiment 50, wherein the pharmaceutical composition consists essentially of the modified oligonucleotide and PBS.

[0126] Embodiment 53. A method of modulating splicing of an SCN1A RNA in a cell comprising contacting the cell with an oligomeric compound of any of embodiments 1-37, a modified oligonucleotide of any of embodiments 38-40, a chirally-enriched population of any of embodiments 41-47, a population of modified oligonucleotides of embodiment 48, or a pharmaceutical composition of any of embodiments 49-52.

[0127] Embodiment 54. The method of embodiment 53, wherein the amount of SCN1A RNA that includes an NIE is reduced.

[0128] Embodiment 55. The method of embodiment 54, wherein the amount of SCN1A RNA that includes NIE-1 is reduced.

[0129] Embodiment 56. The method of any of embodiments 53-55, wherein the amount of SCN1A RNA that excludes an NIE is increased.

[0130] Embodiment 57. The method of any of embodiments 53-56, wherein the amount of SCN1A RNA that excludes NIE-1 is increased.

[0131] Embodiment 58. A method of increasing the amount of full-length SCN1A RNA in a cell, comprising contacting the cell with an oligomeric compound of any of embodiments 1-37, a modified oligonucleotide of any of embodiments 38-40, a chirally-enriched population of any of embodiments 41-47, a population of modified oligonucleotides of embodiment 48, or a pharmaceutical composition of any of embodiments 49-52.

[0132] Embodiment 59. A method of increasing SCN1A RNA lacking NIE-1 in a cell, tissue, or organ, comprising contacting a cell, tissue, or organ with an oligomeric compound of any of embodiments 1-37, a modified oligonucleotide of any of embodiments 38-40, a chirally-enriched population of any of embodiments 41-47, a population of modified oligonucleotides of embodiment 48, or a pharmaceutical composition of any of embodiments 49-52.

[0133] Embodiment 60. The method of any of embodiments 53-59, wherein the cell is in vitro.

[0134] Embodiment 61. The method of any of embodiments 53-59, wherein the cell is in an animal.

[0135] Embodiment 62. A method of ameliorating a disease associated with SCN1A comprising administering to a subject having or at risk for developing a disease associated with SCN1A a therapeutically effective amount of a pharmaceutical composition according to any of embodiments 49-52, and thereby treating the disease associated with SCN1A.

[0136] Embodiment 63. The method of embodiment 62, comprising identifying a subject having or at risk for developing a disease associated SCN1A.

[0137] Embodiment 64. The method of embodiment 62 or embodiment 63, wherein the disease associated with SCN1A is a developmental or epileptic encephalopathic disease.

[0138] Embodiment 65. The method of embodiment 64, wherein the developmental or epileptic encephalopathic disease is Dravet Syndrome.

[0139] Embodiment 66. The method of embodiment 64, wherein the developmental or epileptic encephalopathic disease is any of Genetic Epilepsy with Febrile Seizures Plus (GEFS+), febrile seizures, Idiopathic/Generic Generalized Epilepsies (IGE/GGE), Temporal Lobe Epilepsy, Myoclonic Astatic Epilepsy (MAE), Lennox-Gastaut Syndrome, or Migrating Partial Epilepsy of Infancy (MMPSI).

[0140] Embodiment 67. The method of any of embodiments 64-66, wherein at least one symptom of the developmental or epileptic encephalopathic disease is ameliorated.

[0141] Embodiment 68. The method of embodiment 67, wherein the symptom is any of seizures, behavioral and developmental delays, movement and balance dysfunctions, motor and cognitive dysfunctions, delayed language and speech, visual motor integration dysfunctions, visual perception dysfunctions, executive dysfunctions, growth and nutrition issues, sleeping difficulties, chronic infections, sensory integration disorders, or dysautonomia.

[0142] Embodiment 69. The method of embodiment 68, wherein the seizures are frequent or prolonged.

[0143] Embodiment 70. The method of embodiment 68 or embodiment 69, wherein the seizure is any of convulsive, myoclonic, absence, focal, obtundation status, or tonic.

[0144] Embodiment 71. The method of any of embodiments 62-70, wherein the pharmaceutical composition is administered to the central nervous system or systemically.

[0145] Embodiment 72. The method of embodiment 71, wherein the pharmaceutical composition is administered to the central nervous system and systemically.

[0146] Embodiment 73. The method of any of embodiments 62-71, wherein the pharmaceutical composition is administered any of intrathecally, systemically, subcutaneously, or intramuscularly.

### I. Certain Oligonucleotides

[0147] In certain embodiments, provided herein are oligomeric compounds comprising oligonucleotides, which consist of linked nucleosides. Oligonucleotides may be unmodified oligonucleotides (RNA or DNA) or may be modified oligonucleotides. Modified oligonucleotides comprise at least one modification relative to unmodified RNA or DNA. That is, modified oligonucleotides comprise at least one modified nucleoside (comprising a modified sugar moiety and/or a modified nucleobase) and/or at least one modified internucleoside linkage.

[0148] A. Certain Modified Nucleosides

[0149] Modified nucleosides comprise a modified sugar moiety or a modified nucleobase or both a modified sugar moiety and a modified nucleobase.

[0150] 1. Certain Sugar Moieties

[0151] In certain embodiments, modified sugar moieties are non-bicyclic modified sugar moieties. In certain embodiments, modified sugar moieties are bicyclic or tricyclic sugar moieties. In certain embodiments, modified sugar moieties are sugar surrogates. Such sugar surrogates may comprise one or more substitutions corresponding to those of other types of modified sugar moieties.

[0152] In certain embodiments, modified sugar moieties are non-bicyclic modified sugar moieties comprising a furanosyl ring with one or more substituent groups none of which bridges two atoms of the furanosyl ring to form a bicyclic structure. Such non bridging substituents may be at any position of the furanosyl, including but not limited to substituents at the 2′, 4′, and/or 5′ positions. In certain embodiments one or more non-bridging substituent of non-bicyclic modified sugar moieties is branched. Examples of 2′-substituent groups suitable for non-bicyclic modified sugar moieties include but are not limited to: 2′-F, 2′-OCH₃(“OMe” or “O-methyl”), and 2′-O(CH₂)₂OCH₃(“MOE” or “O-methoxyethyl”), and 2′-O—N-alkyl acetamide, e.g., 2′-O—N-methyl acetamide (“NMA”), 2′-O—N-dimethyl acetamide, 2′-O—N-ethyl acetamide, or 2′-O—N-propyl acetamide. For example, see U.S. Pat. No. 6,147,200, Prakash et al., 2003, Org. Lett., 5, 403-6. A “2′-O—N-methyl acetamide nucleoside” or “2′-NMA nucleoside” is shown below:

[chemical structure]

[0153] In certain embodiments, 2′-substituent groups are selected from among: halo, allyl, amino, azido, SH, CN, OCN, CF₃, OCF₃, O—C₁-C₁₀ alkoxy, O—C₁-C₁₀ substituted alkoxy, O—C₁-C₁₀ alkyl, O—C₁-C₁₀ substituted alkyl, S-alkyl, N(Rₘ)-alkyl, O-alkenyl, 5-alkenyl, N(Rₘ)-alkenyl, O-alkynyl, S-alkynyl, N(Rₘ)-alkynyl, O-alkylenyl-O-alkyl, alkynyl, alkaryl, aralkyl, O-alkaryl, O-aralkyl, O(CH₂)₂SCH₃, O(CH₂)₂ON(Rₘ)(Rₙ) or OCH₂C(═O)—N(Rₘ)(Rₙ), where each Rₘ and Rₙ is, independently, H, an amino protecting group, or substituted or unsubstituted C₁-C₁₀ alkyl, and the 2′-substituent groups described in Cook et al., U.S. Pat. No. 6,531,584; Cook et al., U.S. Pat. No. 5,859,221; and Cook et al., U.S. Pat. No. 6,005,087. Certain embodiments of these 2′-substituent groups can be further substituted with one or more substituent groups independently selected from among: hydroxyl, amino, alkoxy, carboxy, benzyl, phenyl, nitro (NO₂), thiol, thioalkoxy, thioalkyl, halogen, alkyl, aryl, alkenyl and alkynyl. Examples of 4′-substituent groups suitable for non-bicyclic modified sugar moieties include but are not limited to alkoxy (e.g., methoxy), alkyl, and those described in Manoharan et al., WO 2015/106128. Examples of 5′-substituent groups suitable for non-bicyclic modified sugar moieties include but are not limited to: 5′-methyl (R or 5), 5′-vinyl, and 5′-methoxy. In certain embodiments, non-bicyclic modified sugar moieties comprise more than one non-bridging sugar substituent, for example, 2′-F-5′-methyl sugar moieties and the modified sugar moieties and modified nucleosides described in Migawa et al., WO 2008/101157 and Rajeev et al., US2013/0203836.

[0154] In certain embodiments, a 2′-substituted non-bicyclic modified nucleoside comprises a sugar moiety comprising a non-bridging 2′-substituent group selected from: F, NH₂, N₃, OCF₃, OCH₃, O(CH₂)₃NH₂, CH₂CH═CH₂, OCH₂CH═CH₂, OCH₂CH₂OCH₃, O(CH₂)₂SCH₃, O(CH₂)₂ON(Rₘ)(Rₙ), O(CH₂), ON(CH₃)₂, O(CH₂)₂O(CH₂)₂N(CH₃)₂, and N-substituted acetamide (OCH₂C(═O)—N(Rₘ)(Rₙ)), where each Rₘ and Rₙ is, independently, H, an amino protecting group, or substituted or unsubstituted C₁-C₁₀ alkyl, e.g., for example, OCH₂C(═O)—N(H)CH₃ (“NMA”).

[0155] In certain embodiments, a 2′-substituted non-bicyclic modified nucleoside comprises a sugar moiety comprising a non-bridging 2′-substituent group selected from: F, OCF₃, OCH₃, OCH₂CH₂OCH₃, O(CH₂)₂SCH₃, O(CH₂)₂ON(CH₃)₂, O(CH₂)₂O(CH₂)₂N(CH₃)₂, and OCH₂C(═O)—N(H)CH₃ (“NMA”).

[0156] In certain embodiments, a 2′-substituted non-bicyclic modified nucleoside comprises a sugar moiety comprising a non-bridging 2′-substituent group selected from: F, OCH₃, OCH₂CH₂OCH₃, and OCH2C(═O)—N(H)CH3.

[0157] Certain modified sugar moieties comprise a substituent that bridges two atoms of the furanosyl ring to form a second ring, resulting in a bicyclic sugar moiety. In certain such embodiments, the bicyclic sugar moiety comprises a bridge between the 4′ and the 2′ furanose ring atoms. Examples of such 4′ to 2′ bridging sugar substituents include but are not limited to: 4′-CH₂-2′, 4′-(CH₂)₂-2′, 4′-(CH₂)₃-2′, 4′-CH₂—O-2′ (“LNA”), 4′-CH₂—S-2′, 4′-(CH₂)₂—O-2′ (“ENA”), 4′-CH(CH₃)—O-2′ (referred to as “constrained ethyl” or “cEt”), 4′-CH₂-0-CH₂-2′, 4′-CH₂—N(R)-2′, 4′-CH(CH₂OCH₃)—O-2′ (“constrained MOE” or “cMOE”) and analogs thereof (see, e.g., Seth et al., U.S. Pat. No. 7,399,845, Bhat et al., U.S. Pat. No. 7,569,686, Swayze et al., U.S. Pat. No. 7,741,457, and Swayze et al., U.S. Pat. No. 8,022,193), 4′-C(CH₃)(CH₃)—O-2′ and analogs thereof (see, e.g., Seth et al., U.S. Pat. No. 8,278,283), 4′-CH₂—N(OCH₃)-2′ and analogs thereof (see, e.g., Prakash et al., U.S. Pat. No. 8,278,425), 4′-CH₂—O—N(CH₃)-2′ (see, e.g., Allerson et al., U.S. Pat. No. 7,696,345 and Allerson et al., U.S. Pat. No. 8,124,745), 4′-CH₂—C(H)(CH₃)-2′ (see, e.g., Zhou, et al., J. Org. Chem., 2009, 74, 118-134), 4′-CH₂—C(═CH₂)-2′ and analogs thereof (see e.g., Seth et al., U.S. Pat. No. 8,278,426), 4′-C(RₐR_{b})—N(R)—O-2-, 4′-C(RₐR_{b})—O—N(R)-2′, 4′-CH₂—O—N(R)-2′, and 4′-CH₂—N(R)—O-2′, wherein each R, Rₐ, and R_{b} is, independently, H, a protecting group, or C₁-C₁ alkyl (see, e.g. Imanishi et al., U.S. Pat. No. 7,427,672).

[0158] In certain embodiments, such 4′ to 2′ bridges independently comprise from 1 to 4 linked groups independently selected from: —[C(Rₐ)(R_{b})]ₙ—, —[C(Rₐ)(R_{b})]ₙ—O—, —C(Rₐ)═C(R_{b})—, —C(Rₐ)═N—, —C(═NRₐ)—, —C(═O)—, —C(═S)—, —O—, —Si(Rₐ)₂—, —S(═O)ₓ-, and —N(Rₐ)—;

[0159] wherein:

[0160] x is 0, 1, or 2;

[0161] n is 1, 2, 3, or 4;

[0162] each Rₐ and R_{b} is, independently, H, a protecting group, hydroxyl, C₁-C₁ alkyl, substituted C₁-C₁₂ alkyl, C₂-C₁₂ alkenyl, substituted C₂-C₁₂ alkenyl, C₂-C₁₂ alkynyl, substituted C₂-C₁₂ alkynyl, C₅-C₂₀ aryl, substituted C₅-C₂₀ aryl, heterocycle radical, substituted heterocycle radical, heteroaryl, substituted heteroaryl, C₅-C₇ alicyclic radical, substituted C₅-C₇ alicyclic radical, halogen, OJ₁, NJ₁J₂, SJ₁, N₃, COOJ₁, acyl (C(═O)—H), substituted acyl, CN, sulfonyl (S(═O)₂-J₁), or sulfoxyl (S(═O)-J₁); and

[0163] each J₁ and J₂ is, independently, H, C₁-C₁₂ alkyl, substituted C₁-C₁₂ alkyl, C₂-C₁₂ alkenyl, substituted C₂-C₁₂ alkenyl, C₂-C₁₂ alkynyl, substituted C₂-C₁₂ alkynyl, C₅-C₂₀ aryl, substituted C₅-C₂₀ aryl, acyl (C(═O)—H), substituted acyl, a heterocycle radical, a substituted heterocycle radical, C₁-C₁₂ aminoalkyl, substituted C₁-C₁₂ aminoalkyl, or a protecting group.

[0164] Additional bicyclic sugar moieties are known in the art, see, for example: Freier et al., Nucleic Acids Research, 1997, 25(22), 4429-4443, Albaek et al., J. Org. Chem., 2006, 71, 7731-7740, Singh et al., Chem. Commun., 1998, 4, 455-456; Koshkin et al., Tetrahedron, 1998, 54, 3607-3630; Kumar et al., Bioorg. Med. Chem. Lett., 1998, 8, 2219-2222; Singh et al., J. Org. Chem., 1998, 63, 10035-10039; Srivastava et al., J. Am. Chem. Soc., 2007, 129, 8362-8379; Wengel et a., U.S. Pat. No. 7,053,207; Imanishi et al., U.S. Pat. No. 6,268,490; Imanishi et al. U.S. Pat. No. 6,770,748; Imanishi et al., U.S. RE44,779; Wengel et al., U.S. Pat. No. 6,794,499; Wengel et al., U.S. Pat. No. 6,670,461; Wengel et al., U.S. Pat. No. 7,034,133; Wengel et al., U.S. Pat. No. 8,080,644; Wengel et al., U.S. Pat. No. 8,034,909; Wengel et al., U.S. Pat. No. 8,153,365; Wengel et al., U.S. Pat. No. 7,572,582; and Ramasamy et al., U.S. Pat. No. 6,525,191; Torsten et al., WO 2004/106356; Wengel et al., WO 1999/014226; Seth et al., WO 2007/134181; Seth et al., U.S. Pat. No. 7,547,684; Seth et al., U.S. Pat. No. 7,666,854; Seth et al., U.S. Pat. No. 8,088,746; Seth et al., U.S. Pat. No. 7,750,131; Seth et al., U.S. Pat. No. 8,030,467; Seth et al., U.S. Pat. No. 8,268,980; Seth et al., U.S. Pat. No. 8,546,556; Seth et al., U.S. Pat. No. 8,530,640; Migawa et al., U.S. Pat. No. 9,012,421; Seth et al., U.S. Pat. No. 8,501,805; and U.S. Patent Publication Nos. Allerson et al., US2008/0039618 and Migawa et al., US2015/0191727.

[0165] In certain embodiments, bicyclic sugar moieties and nucleosides incorporating such bicyclic sugar moieties are further defined by isomeric configuration. For example, an LNA nucleoside (described herein) may be in the α-L configuration or in the β-D configuration.

[chemical structure]

α-L-methyleneoxy (4′-CH₂—O-2′) or α-L-LNA bicyclic nucleosides have been incorporated into oligonucleotides that showed antisense activity (Frieden et al., Nucleic Acids Research, 2003, 21, 6365-6372). Herein, general descriptions of bicyclic nucleosides include both isomeric configurations. When the positions of specific bicyclic nucleosides (e.g., LNA or cEt) are identified in exemplified embodiments herein, they are in the β-D configuration, unless otherwise specified.

[0166] In certain embodiments, modified sugar moieties comprise one or more non-bridging sugar substituent and one or more bridging sugar substituent (e.g., 5′-substituted and 4′-2′ bridged sugars).

[0167] In certain embodiments, modified sugar moieties are sugar surrogates. In certain such embodiments, the oxygen atom of the sugar moiety is replaced, e.g., with a sulfur, carbon or nitrogen atom. In certain such embodiments, such modified sugar moieties also comprise bridging and/or non-bridging substituents as described herein. For example, certain sugar surrogates comprise a 4′-sulfur atom and a substitution at the 2′-position (see, e.g., Bhat et al., U.S. Pat. No. 7,875,733 and Bhat et al., U.S. Pat. No. 7,939,677) and/or the 5′ position.

[0168] In certain embodiments, sugar surrogates comprise rings having other than 5 atoms. For example, in certain embodiments, a sugar surrogate comprises a six-membered tetrahydropyran (“THP”). Such tetrahydropyrans may be further modified or substituted. Nucleosides comprising such modified tetrahydropyrans include but are not limited to hexitol nucleic acid (“HNA”), anitol nucleic acid (“ANA”), manitol nucleic acid (“MNA”) (see, e.g., Leumann, C J. Bioorg. & Med. Chem. 2002, 10, 841-854), fluoro HNA:

[chemical structure]

(“F-HNA”, see e.g. Swayze et al., U.S. Pat. No. 8,088,904; Swayze et al., U.S. Pat. No. 8,440,803; Swayze et al., U.S. Pat. No. 8,796,437; and Swayze et al., U.S. Pat. No. 9,005,906; F-HNA can also be referred to as a F-THP or 3′-fluoro tetrahydropyran), and nucleosides comprising additional modified THP compounds having the formula:

[chemical structure]

wherein, independently, for each of said modified THP nucleoside:

[0169] Bx is a nucleobase moiety;

[0170] T₃ and T₄ are each, independently, an internucleoside linking group linking the modified THP nucleoside to the remainder of an oligonucleotide or one of T₃ and T₄ is an internucleoside linking group linking the modified THP nucleoside to the remainder of an oligonucleotide and the other of T₃ and T₄ is H, a hydroxyl protecting group, a linked conjugate group, or a 5′ or 3′-terminal group; q₁, q₂, q₃, q₄, q₅, q₆ and q₇ are each, independently, H, C₁-C₆ alkyl, substituted C₁-C₆ alkyl, C₂-C₆ alkenyl, substituted C₂-C₆ alkenyl, C₂-C₆ alkynyl, or substituted C₂-C₆ alkynyl; and

[0171] each of R₁ and R₂ is independently selected from among: hydrogen, halogen, substituted or unsubstituted alkoxy, NJ₁J₂, SJ₁, N₃, OC(═X)J₁, OC(═X)NJ₁J₂, NJ₃C(═X)NJ₁J₂, and CN, wherein X is O, S or NJ₁, and each J₁, J₂, and J₃ is, independently, H or C₁-C₆ alkyl.

[0172] In certain embodiments, modified THP nucleosides are provided wherein q₁, q₂, q₃, q₄, q₅, q₆ and q₇ are each H. In certain embodiments, at least one of q₁, q₂, q₃, q₄, q₅, q₆ and q₇ is other than H. In certain embodiments, at least one of q₁, q₂, q₃, q₄, q₅, q₆ and q₇ is methyl. In certain embodiments, modified THP nucleosides are provided wherein one of R₁ and R₂ is F. In certain embodiments, R₁ is F and R₂ is H, in certain embodiments, R₁ is methoxy and R₂ is H, and in certain embodiments, R₁ is methoxyethoxy and R₂ is H.

[0173] In certain embodiments, sugar surrogates comprise rings having more than 5 atoms and more than one heteroatom. For example, nucleosides comprising morpholino sugar moieties and their use in oligonucleotides have been reported (see, e.g., Braasch et al., Biochemistry, 2002, 41, 4503-4510 and Summerton et al., U.S. Pat. No. 5,698,685; Summerton et al., U.S. Pat. No. 5,166,315; Summerton et al., U.S. Pat. No. 5,185,444; and Summerton et al., U.S. Pat. No. 5,034,506). As used here, the term “morpholino” means a sugar surrogate having the following structure:

[chemical structure]

In certain embodiments, morpholinos may be modified, for example by adding or altering various substituent groups from the above morpholino structure. Such sugar surrogates are referred to herein as “modified morpholinos.”

[0174] In certain embodiments, sugar surrogates comprise acyclic moieties. Examples of nucleosides and oligonucleotides comprising such acyclic sugar surrogates include but are not limited to: peptide nucleic acid (“PNA”), acyclic butyl nucleic acid (see, e.g., Kumar et al., Org. Biomol. Chem., 2013, 11, 5853-5865), and nucleosides and oligonucleotides described in Manoharan et al., WO2011/133876.

[0175] Many other bicyclic and tricyclic sugar and sugar surrogate ring systems are known in the art that can be used in modified nucleosides.

[0176] 2. Certain Modified Nucleobases

[0177] In certain embodiments, modified oligonucleotides comprise one or more nucleosides comprising an unmodified nucleobase. In certain embodiments, modified oligonucleotides comprise one or more nucleosides comprising a modified nucleobase. In certain embodiments, modified oligonucleotides comprise one or more nucleosides that does not comprise a nucleobase, referred to as an abasic nucleoside.

[0178] In certain embodiments, modified nucleobases are selected from: 5-substituted pyrimidines, 6-azapyrimidines, alkyl or alkynyl substituted pyrimidines, alkyl substituted purines, and N-2, N-6 and 0-6 substituted purines. In certain embodiments, modified nucleobases are selected from: 2-aminopropyladenine, 5-hydroxymethyl cytosine, xanthine, hypoxanthine, 2-aminoadenine, 6-N-methylguanine, 6-N-methyladenine, 2-propyl adenine, 2-thiouracil, 2-thiothymine and 2-thiocytosine, 5-propynyl (—C≡C—CH₃) uracil, 5-propynylcytosine, 6-azouracil, 6-azocytosine, 6-azothymine, 5-ribosyluracil (pseudouracil), 4-thiouracil, 8-halo, 8-amino, 8-thiol, 8-thioalkyl, 8-hydroxyl, 8-aza and other 8-substituted purines, 5-halo, particularly 5-bromo, 5-trifluoromethyl, 5-halouracil, and 5-halocytosine, 7-methylguanine, 7-methyladenine, 2-F-adenine, 2-aminoadenine, 7-deazaguanine, 7-deazaadenine, 3-deazaguanine, 3-deazaadenine, 6-N-benzoyladenine, 2-N-isobutyrylguanine, 4-N-benzoylcytosine, 4-N-benzoyluracil, 5-methyl 4-N-benzoylcytosine, 5-methyl 4-N-benzoyluracil, universal bases, hydrophobic bases, promiscuous bases, size-expanded bases, and fluorinated bases. Further modified nucleobases include tricyclic pyrimidines, such as 1,3-diazaphenoxazine-2-one, 1,3-diazaphenothiazine-2-one and 9-(2-aminoethoxy)-1,3-diazaphenoxazine-2-one (G-clamp). Modified nucleobases may also include those in which the purine or pyrimidine base is replaced with other heterocycles, for example 7-deaza-adenine, 7-deazaguanosine, 2-aminopyridine and 2-pyridone. Further nucleobases include those disclosed in Merigan et al., U.S. Pat. No. 3,687,808, those disclosed in The Concise Encyclopedia Of Polymer Science And Engineering, Kroschwitz, J. I., Ed., John Wiley & Sons, 1990, 858-859; Englisch et al., Angewandte Chemie, International Edition, 1991, 30, 613; Sanghvi, Y. S., Chapter 15, Antisense Research and Applications, Crooke, S. T. and Lebleu, B., Eds., CRC Press, 1993, 273-288; and those disclosed in Chapters 6 and 15, Antisense Drug Technology, Crooke S. T., Ed., CRC Press, 2008, 163-166 and 442-443.

[0179] Publications that teach the preparation of certain of the above noted modified nucleobases as well as other modified nucleobases include without limitation, Manoharan et al., US2003/0158403; Manoharan et al., US2003/0175906; Dinh et al., U.S. Pat. No. 4,845,205; Spielvogel et al., U.S. Pat. No. 5,130,302; Rogers et al., U.S. Pat. No. 5,134,066; Bischofberger et al., U.S. Pat. No. 5,175,273; Urdea et al., U.S. Pat. No. 5,367,066; Benner et al., U.S. Pat. No. 5,432,272; Matteucci et al., U.S. Pat. No. 5,434,257; Gmeiner et al., U.S. Pat. No. 5,457,187; Cook et al., U.S. Pat. No. 5,459,255; Froehler et al., U.S. Pat. No. 5,484,908; Matteucci et al., U.S. Pat. No. 5,502,177; Hawkins et al., U.S. Pat. No. 5,525,711; Haralambidis et al., U.S. Pat. No. 5,552,540; Cook et al., U.S. Pat. No. 5,587,469; Froehler et al., U.S. Pat. No. 5,594,121; Switzer et al., U.S. Pat. No. 5,596,091; Cook et al., U.S. Pat. No. 5,614,617; Froehler et al., U.S. Pat. No. 5,645,985; Cook et al., U.S. Pat. No. 5,681,941; Cook et al., U.S. Pat. No. 5,811,534; Cook et al., U.S. Pat. No. 5,750,692; Cook et al., U.S. Pat. No. 5,948,903; Cook et al., U.S. Pat. No. 5,587,470; Cook et al., U.S. Pat. No. 5,457,191; Matteucci et al., U.S. Pat. No. 5,763,588; Froehler et al., U.S. Pat. No. 5,830,653; Cook et al., U.S. Pat. No. 5,808,027; Cook et al., 6,166,199; and Matteucci et al., U.S. Pat. No. 6,005,096.

[0180] 3. Certain Modified Internucleoside Linkages

[0181] In certain embodiments, nucleosides of modified oligonucleotides may be linked together using any internucleoside linkage. The two main classes of internucleoside linking groups are defined by the presence or absence of a phosphorus atom. Representative phosphorus-containing internucleoside linkages include but are not limited to phosphodiesters, which contain a phosphodiester bond, P(O₂)═O, (also referred to as unmodified or naturally occurring linkages); phosphotriesters; methylphosphonates; methoxypropylphosphonates (“MOP”); phosphoramidates; mesyl phosphoramidates; phosphorothioates (P(O₂)═S); and phosphorodithioates (HS—P═S). Representative non-phosphorus containing internucleoside linking groups include but are not limited to methylenemethylimino (—CH₂—N(CH₃)—O—CH₂—); thiodiester, thionocarbamate (—O—C(═O)(NH)—S—); siloxane (—O—SiH₂—O—); and N,N′-dimethylhydrazine (—CH₂—N(CH₃)—N(CH₃)—). Modified intemucleoside linkages, compared to naturally occurring phosphate linkages, can be used to alter, typically increase, nuclease resistance of the oligonucleotide. In certain embodiments, internucleoside linkages having a chiral atom can be prepared as a racemic mixture, or as separate enantiomers. Methods of preparation of phosphorous-containing and non-phosphorous-containing internucleoside linkages are well known to those skilled in the art.

[0182] Representative internucleoside linkages having a chiral center include but are not limited to alkylphosphonates and phosphorothioates. Modified oligonucleotides comprising internucleoside linkages having a chiral center can be prepared as populations of modified oligonucleotides comprising stereorandom internucleoside linkages, or as populations of modified oligonucleotides comprising phosphorothioate internucleoside linkages in particular stereochemical configurations. In certain embodiments, populations of modified oligonucleotides comprise phosphorothioate internucleoside linkages wherein all of the phosphorothioate internucleoside linkages are stereorandom. Such modified oligonucleotides can be generated using synthetic methods that result in random selection of the stereochemical configuration of each phosphorothioate internucleoside linkage. Nonetheless, as is well understood by those of skill in the art, each individual phosphorothioate of each individual oligonucleotide molecule has a defined stereoconfiguration. In certain embodiments, populations of modified oligonucleotides are enriched for modified oligonucleotides comprising one or more particular phosphorothioate internucleoside linkages in a particular, independently selected stereochemical configuration. In certain embodiments, the particular configuration of the particular phosphorothioate internucleoside linkage is present in at least 65% of the molecules in the population. In certain embodiments, the particular configuration of the particular phosphorothioate intemucleoside linkage is present in at least 70% of the molecules in the population. In certain embodiments, the particular configuration of the particular phosphorothioate internucleoside linkage is present in at least 80% of the molecules in the population. In certain embodiments, the particular configuration of the particular phosphorothioate internucleoside linkage is present in at least 90% of the molecules in the population. In certain embodiments, the particular configuration of the particular phosphorothioate intemucleoside linkage is present in at least 99% of the molecules in the population. Such chirally enriched populations of modified oligonucleotides can be generated using synthetic methods known in the art, e.g., methods described in Oka et al., JACS, 2003, 125, 8307, Wan et al. Nuc. Acid. Res., 2014, 42, 13456, and WO 2017/015555. In certain embodiments, a population of modified oligonucleotides is enriched for modified oligonucleotides having at least one indicated phosphorothioate in the (Sp) configuration. In certain embodiments, a population of modified oligonucleotides is enriched for modified oligonucleotides having at least one phosphorothioate in the (Rp) configuration. In certain embodiments, modified oligonucleotides comprising (Rp) and/or (Sp) phosphorothioates comprise one or more of the following formulas, respectively, wherein “B” indicates a nucleobase:

[chemical structure]

Unless otherwise indicated, chiral internucleoside linkages of modified oligonucleotides described herein can be stereorandom or in a particular stereochemical configuration.

[0183] In certain embodiments, modified oligonucleotides comprise an internucleoside motif of (5′ to 3′) sooosssssssssssssss. In certain embodiments, the particular stereochemical configuration of the modified oligonucleotides is (5′ to 3′) Sp-o-o-o-Sp-Sp-Sp-Rp-Sp-Sp-Rp-Sp-Sp-Sp-Sp-Sp-Sp-Sp-Sp or Sp-o-o-o-Sp-Sp-Sp-Rp-Sp-Sp-Sp-Sp-Sp-Sp-Sp-Sp-Sp-Sp-Sp; wherein each ‘Sp’ represents a phosphorothioate internucleoside linkage in the S configuration; Rp represents a phosphorothioate intemucleoside linkage in the R configuration; and ‘o’ represents a phosphodiester intemucleoside linkage.

[0184] Neutral internucleoside linkages include, without limitation, phosphotriesters, methylphosphonates, MMI (3′-CH₂—N(CH₃)—O-5′), amide-3 (3′-CH₂—C(═O)—N(H)-5′), amide-4 (3′-CH₂—N(H)—C(═O)-5′), formacetal (3′-O—CH₂—O-5′), methoxypropyl, and thioformacetal (3′-S—CH₂—O-5′). Further neutral intemucleoside linkages include nonionic linkages comprising siloxane (dialkylsiloxane), carboxylate ester, carboxamide, sulfide, sulfonate ester and amides (see e.g., Carbohydrate Modifications in Antisense Research; Y. S. Sanghvi and P. D. Cook, Eds., ACS Symposium Series 580; Chapters 3 and 4, 40-65). Further neutral internucleoside linkages include nonionic linkages comprising mixed N, O, S and CH₂ component parts. In certain embodiments, a modified internucleoside linkage is any of those described in WO 2021/030778, incorporated by reference herein.

[0185] B. Certain Motifs

[0186] In certain embodiments, modified oligonucleotides comprise one or more modified nucleosides comprising a modified sugar moiety. In certain embodiments, modified oligonucleotides comprise one or more modified nucleosides comprising a modified nucleobase. In certain embodiments, modified oligonucleotides comprise one or more modified internucleoside linkages. In such embodiments, the modified, unmodified, and differently modified sugar moieties, nucleobases, and/or internucleoside linkages of a modified oligonucleotide define a pattern or motif. In certain embodiments, the patterns of sugar moieties, nucleobases, and internucleoside linkages are each independent of one another. Thus, a modified oligonucleotide may be described by its sugar motif, nucleobase motif and/or internucleoside linkage motif (as used herein, nucleobase motif describes the modifications to the nucleobases independent of the sequence of nucleobases).

[0187] 1. Certain Sugar Motifs

[0188] In certain embodiments, oligonucleotides comprise one or more type of modified sugar and/or unmodified sugar moiety arranged along the oligonucleotide, or portion thereof, in a defined pattern or sugar motif. In certain instances, such sugar motifs include but are not limited to any of the sugar modifications discussed herein.

[0189] In certain embodiments, modified oligonucleotides have a gapmer motif, which is defined by two external regions or “wings” and a central or internal region or “gap.” The three regions of a gapmer motif (the 5′-wing, the gap, and the 3′-wing) form a contiguous sequence of nucleosides wherein at least some of the sugar moieties of the nucleosides of each of the wings differ from at least some of the sugar moieties of the nucleosides of the gap. Specifically, at least the sugar moieties of the nucleosides of each wing that are closest to the gap (the 3′-most nucleoside of the 5′-wing and the 5′-most nucleoside of the 3′-wing) differ from the sugar moiety of the neighboring gap nucleosides, thus defining the boundary between the wings and the gap (i.e., the wing/gap junction), In certain embodiments, the sugar moieties within the gap are the same as one another. In certain embodiments, the gap includes one or more nucleoside having a sugar moiety that differs from the sugar moiety of one or more other nucleosides of the gap. In certain embodiments, the sugar motifs of the two wings are the same as one another (symmetric gapmer). In certain embodiments, the sugar motif of the 5-wing differs from the sugar motif of the 3-wing (asymmetric gapmer).

[0190] In certain embodiments, the wings of a gapmer comprise 1-6 nucleosides. In certain embodiments, each nucleoside of each wing of a gapmer comprises a modified sugar moiety. In certain embodiments, at least one, at least two, at least three, at least four, at least five, or at least six nucleosides of each wing of a gapmer comprises a modified sugar moiety.

[0191] In certain embodiments, the gap of a gapmer comprises 7-12 nucleosides. In certain embodiments, each nucleoside of the gap of a gapmer comprises a 2′-deoxyribosyl sugar moiety. In certain embodiments, at least one nucleoside of the gap of a gapmer comprises a modified sugar moiety and each remaining nucleoside comprises a 2′-deoxyribosyl sugar moiety.

[0192] Herein, the lengths (number of nucleosides) of the three regions of a gapmer may be provided using the notation [#of nucleosides in the 5′-wing]-[#of nucleosides in the gap]-[#of nucleosides in the 3′-wing]. Thus, a 5-10-5 gapmer consists of 5 linked nucleosides in each wing and 10 linked nucleosides in the gap. Where such nomenclature is followed by a specific modification, that modification is the modification in each sugar moiety of each wing and the gap nucleosides comprise a 2′-deoxyribosyl sugar moiety. Thus, a 5-10-5 MOE gapmer consists of 5 linked 2′-MOE nucleosides in the 5′-wing, 10 linked 2′-deoxyribonucleosides in the gap, and 5 linked 2′-MOE nucleosides in the 3′-wing.

[0193] In certain embodiments, each nucleoside of a modified oligonucleotide, or portion thereof, comprises a 2′-substituted sugar moiety, a bicyclic sugar moiety, a sugar surrogate, or a 2′-deoxyribosyl sugar moiety. In certain embodiments, the 2′-substituted sugar moiety is selected from a 2′-MOE sugar moiety, a 2′-NMA sugar moiety, a 2′-OMe sugar moiety, and a 2′-F sugar moiety. In certain embodiments, the bicyclic sugar moiety is selected from a cEt sugar moiety and an LNA sugar moiety. In certain embodiments, the sugar surrogate is selected from morpholino, modified morpholino, PNA, THP, and F-HNA.

[0194] In certain embodiments, modified oligonucleotides comprise at least 12, at least 13, at least 14, at least 15, at least 16, at least 17, at least 18, at least 19, or at least 20 nucleosides comprising a modified sugar moiety. In certain embodiments, the modified sugar moiety is selected independently from a 2′-substituted sugar moiety, a bicyclic sugar moiety, or a sugar surrogate. In certain embodiments, the 2′-substituted sugar moiety is selected from a 2′-MOE sugar moiety, a 2′-NMA sugar moiety, a 2′-OMe sugar moiety, and a 2′-F sugar moiety. In certain embodiments, the bicyclic sugar moiety is selected from a cEt sugar moiety and an LNA sugar moiety. In certain embodiments, the sugar surrogate is selected from morpholino, modified morpholino, THP, and F-HNA.

[0195] In certain embodiments, each nucleoside of a modified oligonucleotide comprises a modified sugar moiety (“fully modified oligonucleotide”). In certain embodiments, each nucleoside of a fully modified oligonucleotide comprises a 2′-substituted sugar moiety, a bicyclic sugar moiety, or a sugar surrogate. In certain embodiments, the 2′-substituted sugar moiety is selected from a 2′-MOE sugar moiety, a 2′-NMA sugar moiety, a 2′-OMe sugar moiety, and a 2′-F sugar moiety. In certain embodiments, the bicyclic sugar moiety is selected from a cEt sugar moiety and an LNA sugar moiety. In certain embodiments, the sugar surrogate is selected from morpholino, modified morpholino, THP, and F-HNA. In certain embodiments, each nucleoside of a fully modified oligonucleotide comprises the same modified sugar moiety (“uniformly modified sugar motif”). In certain embodiments, the uniformly modified sugar motif is 7 to 20 nucleosides in length. In certain embodiments, each nucleoside of the uniformly modified sugar motif comprises a 2′-substituted sugar moiety, a bicyclic sugar moiety, or a sugar surrogate. In certain embodiments, the 2′-substituted sugar moiety is selected from a 2′-MOE sugar moiety, a 2′-NMA sugar moiety, a 2′-OMe sugar moiety, and a 2′-F sugar moiety. In certain embodiments, the bicyclic sugar moiety is selected from a cEt sugar moiety and an LNA sugar moiety. In certain embodiments, the sugar surrogate is selected from morpholino, modified morpholino, THP, and F-HNA. In certain embodiments, modified oligonucleotides having at least one fully modified sugar motif may also comprise at least 1, at least 2, at least 3, or at least 4 2′-deoxyribonucleosides.

[0196] 2. Certain Nucleobase Motifs

[0197] In certain embodiments, oligonucleotides comprise modified and/or unmodified nucleobases arranged along the oligonucleotide, or portion thereof, in a defined pattern or motif. In certain embodiments, each nucleobase is modified. In certain embodiments, none of the nucleobases are modified. In certain embodiments, each purine or each pyrimidine is modified. In certain embodiments, each adenine is modified. In certain embodiments, each guanine is modified. In certain embodiments, each thymine is modified. In certain embodiments, each uracil is modified. In certain embodiments, each cytosine is modified. In certain embodiments, some or all of the cytosine nucleobases in a modified oligonucleotide are 5-methyl cytosines. In certain embodiments, all of the cytosine nucleobases are 5-methyl cytosines and all of the other nucleobases of the modified oligonucleotide are unmodified nucleobases.

[0198] In certain embodiments, modified oligonucleotides comprise a block of modified nucleobases. In certain such embodiments, the block is at the 3′-end of the oligonucleotide. In certain embodiments the block is within 3 nucleosides of the 3′-end of the oligonucleotide. In certain embodiments, the block is at the 5′-end of the oligonucleotide. In certain embodiments the block is within 3 nucleosides of the 5′-end of the oligonucleotide.

[0199] In certain embodiments, oligonucleotides having a gapmer motif comprise a nucleoside comprising a modified nucleobase. In certain such embodiments, one nucleoside comprising a modified nucleobase is in the central gap of an oligonucleotide having a gapmer motif. In certain such embodiments, the sugar moiety of the nucleoside is a 2′-deoxyribosyl sugar moiety. In certain embodiments, the modified nucleobase is selected from: a 2-thiopyrimidine and a 5-propynepyrimidine.

[0200] 3. Certain Internucleoside Linkage Motifs

[0201] In certain embodiments, oligonucleotides comprise modified and/or unmodified intemucleoside linkages arranged along the oligonucleotide, or portion thereof, in a defined pattern or motif. In certain embodiments, each intemucleoside linking group is a phosphodiester intemucleoside linkage. In certain embodiments, each intemucleoside linking group of a modified oligonucleotide is a phosphorothioate intemucleoside linkage. In certain embodiments, each intemucleoside linkage of a modified oligonucleotide is independently selected from a phosphorothioate intemucleoside linkage and phosphodiester internucleoside linkage. In certain embodiments, each phosphorothioate intemucleoside linkage is independently selected from a stereorandom phosphorothioate, a (Sp) phosphorothioate, and a (Rp) phosphorothioate. In certain embodiments, the sugar motif of a modified oligonucleotide is a gapmer and the intemucleoside linkages within the gap are all modified. In certain such embodiments, some or all of the intemucleoside linkages in the wings are unmodified phosphodiester intemucleoside linkages. In certain embodiments, the terminal intemucleoside linkages are modified. In certain embodiments, the sugar motif of a modified oligonucleotide is a gapmer, and the intemucleoside linkage motif comprises at least one phosphodiester intemucleoside linkage in at least one wing, wherein the at least one phosphodiester internucleoside linkage is not a terminal intemucleoside linkage, and the remaining intemucleoside linkages are phosphorothioate intemucleoside linkages. In certain such embodiments, all of the phosphorothioate internucleoside linkages are stereorandom. In certain embodiments, all of the phosphorothioate intemucleoside linkages in the wings are (Sp) phosphorothioates, and the gap comprises at least one Sp, Sp, Rp motif. In certain embodiments, populations of modified oligonucleotides are enriched for modified oligonucleotides comprising such intemucleoside linkage motifs.

[0202] In certain embodiments, modified oligonucleotides comprise at least 1, at least 2, at least 3, at least 4, at least 5, at least 6, at least 7, at least 8, at least 9, at least 10, at least 11, at least 12, at least 13, at least 14, at least 15, at least 16, at least 17, at least 18, or at least 19 phosphodiester intemucleoside linkages. In certain embodiments, modified oligonucleotides comprise at least 1, at least 2, at least 3, at least 4, at least 5, at least 6, at least 7, at least 8, at least 9, at least 10, at least 11, at least 12, at least 13, at least 14, at least 15, at least 16, at least 17, at least 18, or at least 19 phosphorothioate internucleoside linkages. In certain embodiments, modified oligonucleotides comprise at least 1, at least 2, at least 3, at least 4, or at least 5 phosphodiester internucleoside linkages and the remainder of the internucleoside linkages are phosphorothioate internucleoside linkages.

[0203] C. Certain Lengths

[0204] It is possible to increase or decrease the length of an oligonucleotide without eliminating activity. For example, in Woolf et al., Proc. Natl. Acad. Sci. USA, 1992, 89, 7305-7309, 1992), a series of oligonucleotides 13-25 nucleobases in length were tested for their ability to induce cleavage of a target nucleic acid in an oocyte injection model. Oligonucleotides 25 nucleobases in length with 8 or 11 mismatch bases near the ends of the oligonucleotides were able to direct specific cleavage of the target nucleic acid, albeit to a lesser extent than the oligonucleotides that contained no mismatches. Similarly, target specific cleavage was achieved using 13 nucleobase oligonucleotides, including those with 1 or 3 mismatches.

[0205] In certain embodiments, oligonucleotides (including modified oligonucleotides) can have any of a variety of ranges of lengths. In certain embodiments, oligonucleotides consist of X to Y linked nucleosides, where X represents the fewest number of nucleosides in the range and Y represents the largest number nucleosides in the range. In certain such embodiments, X and Y are each independently selected from 8, 9, 10, 11, 12, 13, 14, 15, 16, 17, 18, 19, 20, 21, 22, 23, 24, 25, 26, 27, 28, 29, 30, 31, 32, 33, 34, 35, 36, 37, 38, 39, 40, 41, 42, 43, 44, 45, 46, 47, 48, 49, and 50; provided that X≤Y. For example, in certain embodiments, oligonucleotides consist of 12 to 13, 12 to 14, 12 to 15, 12 to 16, 12 to 17, 12 to 18, 12 to 19, 12 to 20, 12 to 21, 12 to 22, 12 to 23, 12 to 24, 12 to 25, 12 to 26, 12 to 27, 12 to 28, 12 to 29, 12 to 30, 13 to 14, 13 to 15, 13 to 16, 13 to 17, 13 to 18, 13 to 19, 13 to 20, 13 to 21, 13 to 22, 13 to 23, 13 to 24, 13 to 25, 13 to 26, 13 to 27, 13 to 28, 13 to 29, 13 to 30, 14 to 15, 14 to 16, 14 to 17, 14 to 18, 14 to 19, 14 to 20, 14 to 21, 14 to 22, 14 to 23, 14 to 24, 14 to 25, 14 to 26, 14 to 27, 14 to 28, 14 to 29, 14 to 30, 15 to 16, 15 to 17, 15 to 18, 15 to 19, 15 to 20, 15 to 21, 15 to 22, 15 to 23, 15 to 24, 15 to 25, 15 to 26, 15 to 27, 15 to 28, 15 to 29, 15 to 30, 16 to 17, 16 to 18, 16 to 19, 16 to 20, 16 to 21, 16 to 22, 16 to 23, 16 to 24, 16 to 25, 16 to 26, 16 to 27, 16 to 28, 16 to 29, 16 to 30, 17 to 18, 17 to 19, 17 to 20, 17 to 21, 17 to 22, 17 to 23, 17 to 24, 17 to 25, 17 to 26, 17 to 27, 17 to 28, 17 to 29, 17 to 30, 18 to 19, 18 to 20, 18 to 21, 18 to 22, 18 to 23, 18 to 24, 18 to 25, 18 to 26, 18 to 27, 18 to 28, 18 to 29, 18 to 30, 19 to 20, 19 to 21, 19 to 22, 19 to 23, 19 to 24, 19 to 25, 19 to 26, 19 to 29, 19 to 28, 19 to 29, 19 to 30, 20 to 21, 20 to 22, 20 to 23, 20 to 24, 20 to 25, 20 to 26, 20 to 27, 20 to 28, 20 to 29, 20 to 30, 21 to 22, 21 to 23, 21 to 24, 21 to 25, 21 to 26, 21 to 27, 21 to 28, 21 to 29, 21 to 30, 22 to 23, 22 to 24, 22 to 25, 22 to 26, 22 to 27, 22 to 28, 22 to 29, 22 to 30, 23 to 24, 23 to 25, 23 to 26, 23 to 27, 23 to 28, 23 to 29, 23 to 30, 24 to 25, 24 to 26, 24 to 27, 24 to 28, 24 to 29, 24 to 30, 25 to 26, 25 to 27, 25 to 28, 25 to 29, 25 to 30, 26 to 27, 26 to 28, 26 to 29, 26 to 30, 27 to 28, 27 to 29, 27 to 30, 28 to 29, 28 to 30, or 29 to 30 linked nucleosides.

[0206] In certain embodiments, oligonucleotides consist of 16 linked nucleosides. In certain embodiments, oligonucleotides consist of 17 linked nucleosides. In certain embodiments, oligonucleotides consist of 18 linked nucleosides. In certain embodiments, oligonucleotides consist of 19 linked nucleosides. In certain embodiments, oligonucleotides consist of 20 linked nucleosides.

[0207] D. Certain Modified Oligonucleotides

[0208] In certain embodiments, the above modifications (sugar, nucleobase, internucleoside linkage) are incorporated into a modified oligonucleotide. In certain embodiments, modified oligonucleotides are characterized by their modification motifs and overall lengths. In certain embodiments, such parameters are each independent of one another. Thus, unless otherwise indicated, each internucleoside linkage of an oligonucleotide having a gapmer sugar motif may be modified or unmodified and may or may not follow the gapmer modification pattern of the sugar modifications. For example, the internucleoside linkages within the wing regions of a sugar gapmer may be the same or different from one another and may be the same or different from the internucleoside linkages of the gap region of the sugar motif. Likewise, such sugar gapmer oligonucleotides may comprise one or more modified nucleobase independent of the gapmer pattern of the sugar modifications. Unless otherwise indicated, all modifications are independent of nucleobase sequence.

[0209] E. Certain Populations of Modified Oligonucleotides

[0210] Populations of modified oligonucleotides in which all of the modified oligonucleotides of the population have the same molecular formula can be stereorandom populations or chirally enriched populations. All of the chiral centers of all of the modified oligonucleotides are stereorandom in a stereorandom population. In a chirally enriched population, at least one particular chiral center is not stereorandom in the modified oligonucleotides of the population. In certain embodiments, the modified oligonucleotides of a chirally enriched population are enriched for β-D ribosyl sugar moieties, and all of the phosphorothioate internucleoside linkages are stereorandom. In certain embodiments, the modified oligonucleotides of a chirally enriched population are enriched for both β-D ribosyl sugar moieties and at least one, particular phosphorothioate internucleoside linkage in a particular stereochemical configuration.

[0211] F. Nucleobase Sequence

[0212] In certain embodiments, oligonucleotides (unmodified or modified oligonucleotides) are further described by their nucleobase sequence. In certain embodiments oligonucleotides have a nucleobase sequence that is complementary to a second oligonucleotide or an identified reference nucleic acid, such as a target nucleic acid. In certain such embodiments, a portion of an oligonucleotide has a nucleobase sequence that is complementary to a second oligonucleotide or an identified reference nucleic acid, such as a target nucleic acid. In certain embodiments, the nucleobase sequence of a portion or entire length of an oligonucleotide is at least 50%, at least 60%, at least 70%, at least 80%, at least 85%, at least 90%, at least 95%, or 100% complementary to the second oligonucleotide or nucleic acid, such as a target nucleic acid.

### II. Certain Oligomeric Compounds

[0213] In certain embodiments, provided herein are oligomeric compounds, which consist of an oligonucleotide (modified or unmodified) and optionally one or more conjugate groups and/or terminal groups. Conjugate groups consist of one or more conjugate moiety and a conjugate linker which links the conjugate moiety to the oligonucleotide. Conjugate groups may be attached to either or both ends of an oligonucleotide and/or at any internal position. In certain embodiments, conjugate groups are attached to the 2′-position of a nucleoside of a modified oligonucleotide. In certain embodiments, conjugate groups that are attached to either or both ends of an oligonucleotide are terminal groups. In certain such embodiments, conjugate groups or terminal groups are attached at the 3′ and/or 5′-end of oligonucleotides. In certain such embodiments, conjugate groups (or terminal groups) are attached at the 3′-end of oligonucleotides. In certain embodiments, conjugate groups are attached near the 3′-end of oligonucleotides. In certain embodiments, conjugate groups (or terminal groups) are attached at the 5′-end of oligonucleotides. In certain embodiments, conjugate groups are attached near the 5′-end of oligonucleotides.

[0214] Examples of terminal groups include but are not limited to conjugate groups, capping groups, phosphate moieties, protecting groups, abasic nucleosides, modified or unmodified nucleosides, and two or more nucleosides that are independently modified or unmodified.

[0215] A. Certain Conjugate Groups

[0216] In certain embodiments, oligonucleotides are covalently attached to one or more conjugate groups. In certain embodiments, conjugate groups modify one or more properties of the attached oligonucleotide, including but not limited to pharmacodynamics, pharmacokinetics, stability, binding, absorption, tissue distribution, cellular distribution, cellular uptake, charge, and clearance. In certain embodiments, conjugate groups impart a new property on the attached oligonucleotide, e.g., fluorophores or reporter groups that enable detection of the oligonucleotide. Certain conjugate groups and conjugate moieties have been described previously, for example: cholesterol moiety (Letsinger et al., Proc. Natl. Acad. Sci. USA, 1989, 86, 6553-6556), cholic acid (Manoharan et al., Bioorg. Med. Chem. Lett., 1994, 4, 1053-1060), a thioether, e.g., hexyl-S-tritylthiol (Manoharan et al., Ann. N.Y. Acad. Sci., 1992, 660, 306-309; Manoharan et al., Bioorg. Med. Chem. Lett., 1993, 3, 2765-2770), a thiocholesterol (Oberhauser et al., Nucl. Acids Res., 1992, 20, 533-538), an aliphatic chain, e.g., do-decan-diol or undecyl residues (Saison-Behmoaras et al., EMBO J., 1991, 10, 1111-1118; Kabanov et al., FEBS Lett., 1990, 259, 327-330; Svinarchuk et al., Biochimie, 1993, 75, 49-54), a phospholipid, e.g., di-hexadecyl-rac-glycerol or triethyl-ammonium 1,2-di-O-hexadecyl-rac-glycero-3-H-phosphonate (Manoharan et al., Tetrahedron Lett., 1995, 36, 3651-3654; Shea et al., Nucl. Acids Res., 1990, 18, 3777-3783), a polyamine or a polyethylene glycol chain (Manoharan et al., Nucleosides & Nucleotides, 1995, 14, 969-973), or adamantane acetic acid a palmityl moiety (Mishra et al., Biochim. Biophys. Acta, 1995, 1264, 229-237), an octadecylamine or hexylamino-carbonyl-oxycholesterol moiety (Crooke et al., J. Pharmacol. Exp. Ther., 1996, 277, 923-937), a tocopherol group (Nishina et al., Molecular Therapy Nucleic Acids, 2015, 4, e220; and Nishina et al., Molecular Therapy 2008, 16, 734-740), or a GalNAc cluster (e.g., WO2014/179620).

[0217] 1. Conjugate Moieties

[0218] Conjugate moieties include, without limitation, intercalators, reporter molecules, polyamines, polyamides, peptides, carbohydrates, vitamin moieties, polyethylene glycols, thioethers, polyethers, cholesterols, thiocholesterols, cholic acid moieties, folate, lipids, lipophilic groups, phospholipids, biotin, phenazine, phenanthridine, anthraquinone, adamantane, acridine, fluoresceins, rhodamines, coumarins, fluorophores, and dyes.

[0219] In certain embodiments, a conjugate moiety comprises an active drug substance, for example, aspirin, warfarin, phenylbutazone, ibuprofen, suprofen, fen-bufen, ketoprofen, (S)-(+)-pranoprofen, carprofen, dansylsarcosine, 2,3,5-triiodobenzoic acid, fingolimod, flufenamic acid, folinic acid, a benzothiadiazide, chlorothiazide, a diazepine, indo-methicin, a barbiturate, a cephalosporin, a sulfa drug, an antidiabetic, an antibacterial, or an antibiotic.

[0220] 2. Conjugate Linkers

[0221] Conjugate moieties are attached to oligonucleotides through conjugate linkers. In certain oligomeric compounds, the conjugate linker is a single chemical bond (i.e., the conjugate moiety is attached directly to an oligonucleotide through a single bond). In certain oligomeric compounds, a conjugate moiety is attached to an oligonucleotide via a more complex conjugate linker comprising one or more conjugate linker moieties, which are sub-units making up a conjugate linker. In certain embodiments, the conjugate linker comprises a chain structure, such as a hydrocarbyl chain, or an oligomer of repeating units such as ethylene glycol, nucleosides, or amino acid units.

[0222] In certain embodiments, a conjugate linker comprises one or more groups selected from alkyl, amino, oxo, amide, disulfide, polyethylene glycol, ether, thioether, and hydroxylamino. In certain such embodiments, the conjugate linker comprises groups selected from alkyl, amino, oxo, amide and ether groups. In certain embodiments, the conjugate linker comprises groups selected from alkyl and amide groups. In certain embodiments, the conjugate linker comprises groups selected from alkyl and ether groups. In certain embodiments, the conjugate linker comprises at least one phosphorus moiety. In certain embodiments, the conjugate linker comprises at least one phosphate group. In certain embodiments, the conjugate linker includes at least one neutral linking group.

[0223] In certain embodiments, conjugate linkers, including the conjugate linkers described above, are bifunctional linking moieties, e.g., those known in the art to be useful for attaching conjugate groups to parent compounds, such as the oligonucleotides provided herein. In general, a bifunctional linking moiety comprises at least two functional groups. One of the functional groups is selected to bind to a particular site on a parent compound and the other is selected to bind to a conjugate group. Examples of functional groups used in a bifunctional linking moiety include but are not limited to electrophiles for reacting with nucleophilic groups and nucleophiles for reacting with electrophilic groups. In certain embodiments, bifunctional linking moieties comprise one or more groups selected from amino, hydroxyl, carboxylic acid, thiol, alkyl, alkenyl, and alkynyl.

[0224] Examples of conjugate linkers include but are not limited to pyrrolidine, 8-amino-3,6-dioxaoctanoic acid (ADO), succinimidyl 4-(N-maleimidomethyl) cyclohexane-1-carboxylate (SMCC) and 6-aminohexanoic acid (AHEX or AHA). Other conjugate linkers include but are not limited to substituted or unsubstituted C₁-C₁₀ alkyl, substituted or unsubstituted C₂-C₁₀ alkenyl or substituted or unsubstituted C₂-C₁₀ alkynyl, wherein a nonlimiting list of preferred substituent groups includes hydroxyl, amino, alkoxy, carboxy, benzyl, phenyl, nitro, thiol, thioalkoxy, halogen, alkyl, aryl, alkenyl and alkynyl.

[0225] In certain embodiments, conjugate linkers comprise 1-10 linker-nucleosides. In certain embodiments, conjugate linkers comprise 2-5 linker-nucleosides. In certain embodiments, conjugate linkers comprise exactly 3 linker-nucleosides. In certain embodiments, conjugate linkers comprise the TCA motif. In certain embodiments, such linker-nucleosides are modified nucleosides. In certain embodiments such linker-nucleosides comprise a modified sugar moiety. In certain embodiments, linker-nucleosides are unmodified. In certain embodiments, linker-nucleosides comprise an optionally protected heterocyclic base selected from a purine, substituted purine, pyrimidine or substituted pyrimidine. In certain embodiments, a cleavable moiety is a nucleoside selected from uracil, thymine, cytosine, 4-N-benzoylcytosine, 5-methyl cytosine, 4-N-benzoyl-5-methyl cytosine, adenine, 6-N-benzoyladenine, guanine and 2-N-isobutyrylguanine. It is typically desirable for linker-nucleosides to be cleaved from the oligomeric compound after it reaches a target tissue. Accordingly, linker-nucleosides are typically linked to one another and to the remainder of the oligomeric compound through cleavable bonds. In certain embodiments, such cleavable bonds are phosphodiester bonds.

[0226] Herein, linker-nucleosides are not considered to be part of the oligonucleotide. Accordingly, in embodiments in which an oligomeric compound comprises an oligonucleotide consisting of a specified number or range of linked nucleosides and/or a specified percent complementarity to a reference nucleic acid and the oligomeric compound also comprises a conjugate group comprising a conjugate linker comprising linker-nucleosides, those linker-nucleosides are not counted toward the length of the oligonucleotide and are not used in determining the percent complementarity of the oligonucleotide for the reference nucleic acid. For example, an oligomeric compound may comprise (1) a modified oligonucleotide consisting of 8-30 nucleosides and (2) a conjugate group comprising 1-10 linker-nucleosides that are contiguous with the nucleosides of the modified oligonucleotide. The total number of contiguous linked nucleosides in such an oligomeric compound is more than 30. Alternatively, an oligomeric compound may comprise a modified oligonucleotide consisting of 8-30 nucleosides and no conjugate group. The total number of contiguous linked nucleosides in such an oligomeric compound is no more than 30. Unless otherwise indicated conjugate linkers comprise no more than 10 linker-nucleosides. In certain embodiments, conjugate linkers comprise no more than 5 linker-nucleosides. In certain embodiments, conjugate linkers comprise no more than 3 linker-nucleosides. In certain embodiments, conjugate linkers comprise no more than 2 linker-nucleosides. In certain embodiments, conjugate linkers comprise no more than 1 linker-nucleoside.

[0227] In certain embodiments, it is desirable for a conjugate group to be cleaved from the oligonucleotide. For example, in certain circumstances oligomeric compounds comprising a particular conjugate moiety are better taken up by a particular cell type, but once the oligomeric compound has been taken up, it is desirable that the conjugate group be cleaved to release the unconjugated or parent oligonucleotide. Thus, certain conjugate linkers may comprise one or more cleavable moieties. In certain embodiments, a cleavable moiety is a cleavable bond. In certain embodiments, a cleavable moiety is a group of atoms comprising at least one cleavable bond. In certain embodiments, a cleavable moiety comprises a group of atoms having one, two, three, four, or more than four cleavable bonds. In certain embodiments, a cleavable moiety is selectively cleaved inside a cell or subcellular compartment, such as a lysosome. In certain embodiments, a cleavable moiety is selectively cleaved by endogenous enzymes, such as nucleases.

[0228] In certain embodiments, a cleavable bond is selected from among: an amide, an ester, an ether, one or both esters of a phosphodiester, a phosphate ester, a carbamate, or a disulfide. In certain embodiments, a cleavable bond is one or both of the esters of a phosphodiester. In certain embodiments, a cleavable moiety comprises a phosphate or phosphodiester. In certain embodiments, the cleavable moiety is a phosphate linkage between an oligonucleotide and a conjugate moiety or conjugate group.

[0229] In certain embodiments, a cleavable moiety comprises or consists of one or more linker-nucleosides. In certain such embodiments, the one or more linker-nucleosides are linked to one another and/or to the remainder of the oligomeric compound through cleavable bonds. In certain embodiments, such cleavable bonds are unmodified phosphodiester bonds. In certain embodiments, a cleavable moiety is 2′-deoxyribonucleoside that is attached to either the 3′ or 5′-terminal nucleoside of an oligonucleotide by a phosphate internucleoside linkage and covalently attached to the remainder of the conjugate linker or conjugate moiety by a phosphate or phosphorothioate internucleoside linkage. In certain such embodiments, the cleavable moiety is 2′-deoxyadenosine.

[0230] B. Certain Terminal Groups

[0231] In certain embodiments, oligomeric compounds comprise one or more terminal groups. In certain such embodiments, oligomeric compounds comprise a stabilized 5′-phosphate. Stabilized 5′-phosphates include, but are not limited to 5′-phosphanates, including, but not limited to 5′-vinylphosphonates. In certain embodiments, terminal groups comprise one or more abasic nucleosides and/or inverted nucleosides. In certain embodiments, terminal groups comprise one or more 2′-linked nucleosides. In certain such embodiments, the 2′-linked nucleoside is an abasic nucleoside.

[0232] C. Oligomeric Duplexes

[0233] In certain embodiments, oligomeric compounds described herein comprise an oligonucleotide, having a nucleobase sequence complementary to that of a target nucleic acid. In certain embodiments, an oligomeric compound is paired with a second oligomeric compound to form an oligomeric duplex. Such oligomeric duplexes comprise a first oligomeric compound having a portion complementary to a target nucleic acid and a second oligomeric compound having a portion complementary to the first oligomeric compound. In certain embodiments, the first oligomeric compound of an oligomeric duplex comprises or consists of (1) a modified or unmodified oligonucleotide and optionally a conjugate group and (2) a second modified or unmodified oligonucleotide and optionally a conjugate group. Either or both oligomeric compounds of an oligomeric duplex may comprise a conjugate group. The oligonucleotides of each oligomeric compound of an oligomeric duplex may include non-complementary overhanging nucleosides.

[0234] D. Antisense Activity

[0235] In certain embodiments, oligomeric compounds and oligomeric duplexes are capable of hybridizing to a target nucleic acid, resulting in at least one antisense activity; such oligomeric compounds and oligomeric duplexes are antisense compounds. In certain embodiments, antisense compounds have antisense activity when they reduce, modulate, or increase the amount or activity of a target nucleic acid by 25% or more in the standard cell assay. In certain embodiments, antisense compounds selectively affect one or more target nucleic acid. Such antisense compounds comprise a nucleobase sequence that hybridizes to one or more target nucleic acid, resulting in one or more desired antisense activity and does not hybridize to one or more non-target nucleic acid or does not hybridize to one or more non-target nucleic acid in such a way that results in significant undesired antisense activity.

[0236] In certain antisense activities, hybridization of an antisense compound to a target nucleic acid results in recruitment of a protein that cleaves the target nucleic acid. For example, certain antisense compounds result in RNase H mediated cleavage of the target nucleic acid. RNase H is a cellular endonuclease that cleaves the RNA strand of an RNA:DNA duplex. The DNA in such an RNA:DNA duplex need not be unmodified DNA. In certain embodiments, provided herein are antisense compounds that are sufficiently “DNA-like” to elicit RNase H activity. In certain embodiments, one or more non-DNA-like nucleoside in the gap of a gapmer is tolerated.

[0237] In certain antisense activities, an antisense compound or a portion of an antisense compound is loaded into an RNA-induced silencing complex (RISC), ultimately resulting in cleavage of the target nucleic acid. For example, certain antisense compounds result in cleavage of the target nucleic acid by Argonaute. Antisense compounds that are loaded into RISC are RNAi compounds. RNAi compounds may be double-stranded (siRNA) or single-stranded (ssRNA).

[0238] In certain embodiments, hybridization of an antisense compound to a target nucleic acid does not result in recruitment of a protein that cleaves that target nucleic acid. In certain embodiments, hybridization of the antisense compound to the target nucleic acid results in alteration of splicing of the target nucleic acid. In certain embodiments, hybridization of an antisense compound to a target nucleic acid results in inhibition of a binding interaction between the target nucleic acid and a protein or other nucleic acid. In certain embodiments, hybridization of an antisense compound to a target nucleic acid results in alteration of translation of the target nucleic acid. In certain embodiments, hybridization of an antisense compound to a target nucleic acid results in a reduced amount or level of RNA that includes an NIE. In certain embodiments, hybridization of an antisense compound to a target nucleic acid results in exon inclusion. In certain embodiments, hybridization of an antisense compound to a target nucleic acid results in an increase in the amount or activity of a target nucleic acid. In certain embodiments, hybridization of an antisense compound complementary to a target nucleic acid results in alteration of splicing, leading to the inclusion of an exon in the mRNA.

[0239] Antisense activities may be observed directly or indirectly. In certain embodiments, observation or detection of an antisense activity involves observation or detection of a change in an amount of a target nucleic acid or protein encoded by such target nucleic acid, a change in the ratio of splice variants of a nucleic acid or protein and/or a phenotypic change in a cell or subject.

### III. Certain Target Nucleic Acids

[0240] In certain embodiments, oligomeric compounds comprise or consist of an oligonucleotide comprising a portion that is complementary to a target nucleic acid. In certain embodiments, the target nucleic acid is an endogenous RNA molecule. In certain embodiments, the target nucleic acid encodes a protein. In certain such embodiments, the target nucleic acid is selected from: a mature mRNA and a pre-mRNA, including intronic, exonic and untranslated regions. In certain embodiments, the target nucleic acid is a mature mRNA. In certain embodiments, the target nucleic acid is a pre-mRNA. In certain embodiments, the target region is entirely within an intron. In certain embodiments, the target region spans an intron/exon junction. In certain embodiments, the target region is at least 50% within an intron.

[0241] A. Complementarity/Mismatches to the Target Nucleic Acid

[0242] It is possible to introduce mismatch bases without eliminating activity. For example, Gautschi et al (J. Natl. Cancer Inst. 93:463-471, March 2001) demonstrated the ability of an oligonucleotide having 100% complementarity to the bcl-2 mRNA and having 3 mismatches to the bcl-xL mRNA to reduce the expression of both bcl-2 and bcl-xL in vitro and in vivo. Furthermore, this oligonucleotide demonstrated potent anti-tumor activity in vivo. Maher and Dolnick (Nuc. Acid. Res. 16:3341-3358, 1988) tested a series of tandem 14 nucleobase oligonucleotides, and a 28 and 42 nucleobase oligonucleotides comprised of the sequence of two or three of the tandem oligonucleotides, respectively, for their ability to arrest translation of human DHFR in a rabbit reticulocyte assay. Each of the three 14 nucleobase oligonucleotides alone was able to inhibit translation, albeit at a more modest level than the 28 or 42 nucleobase oligonucleotides.

[0243] In certain embodiments, oligonucleotides are complementary to the target nucleic acid over the entire length of the oligonucleotide. In certain embodiments, oligonucleotides are 99%, 95%, 90%, 85%, or 80% complementary to the target nucleic acid. In certain embodiments, oligonucleotides are at least 80% complementary to the target nucleic acid over the entire length of the oligonucleotide and comprise a portion that is 100% or fully complementary to a target nucleic acid. In certain embodiments, the portion of full complementarity is 6, 7, 8, 9, 10, 11, 12, 13, 14, 15, 16, 17, 18, 19, or 20 nucleobases in length.

[0244] In certain embodiments, oligonucleotides comprise one or more mismatched nucleobases relative to the target nucleic acid. In certain embodiments, the mismatch is at position 1, 2, 3, 4, 5, 6, 7, 8, 9, 10, 11, 12, 13, 14, 15, 16, 17, 18, 19, or 20 from the 5′-end of the oligonucleotide.

[0245] B. SCN1A

[0246] In certain embodiments, oligomeric compounds comprise or consist of a modified oligonucleotide that is complementary to a target nucleic acid encoding SCN1A, or a portion thereof. In certain embodiments, the SCN1A target nucleic acid has the nucleobase sequence set forth in SEQ ID NO: 1 (the complement of GENBANK Accession No. NC_000002.12 truncated from nucleotides 165982001 to 166152000). In certain embodiments, the SCN1A target nucleic acid has the nucleobase sequence set forth in SEQ ID NO: 2 (GENBANK Accession No. NM_001165963.2).

[0247] In certain embodiments, contacting a cell or subject with an oligomeric compound complementary to SEQ ID NO: 1 or SEQ ID NO: 2 modulates splicing of SCN1A RNA in a cell or a subject. In certain embodiments, contacting a cell or a subject with an oligomeric compound complementary to SEQ ID NO: 1 or SEQ ID NO: 2 increases the amount of SCN1A RNA and/or protein. In certain embodiments, contacting a cell or a subject with an oligomeric compound complementary to SEQ ID NO: 1 or SEQ ID NO: 2 reduces the amount of SCN1A RNA including a NIE. In certain embodiments, contacting a cell or a subject with an oligomeric compound complementary to SEQ ID NO: 1 or SEQ ID NO: 2 increases the amount of SCN1A RNA excluding a NIE. In certain embodiments, the NIE is NIE-1. In certain embodiments, the oligomeric compound comprises or consists of a modified oligonucleotide.

[0248] In certain embodiments, contacting a cell in a subject with an oligomeric compound complementary to SEQ ID NO: 1 or SEQ ID NO: 2 ameliorates one or more symptom of encephalopathy. In certain embodiments, the encephalopathy is Dravet Syndrome. In certain embodiments, the symptom is any of prolonged or frequent seizures, sudden unexpected death in epilepsy, status epilepticus, behavioral and developmental delays, movement and balance dysfunctions, orthopedic conditions, motor and cognitive dysfunctions, delayed language and speech issues, visual motor integration dysfunctions, visual perception dysfunctions, executive dysfunctions, growth and nutrition issues, sleeping difficulties, chronic infections, sensory integration disorders, and dysautonomia.

[0249] C. Certain Target Nucleic Acids in Certain Tissues

[0250] In certain embodiments, oligomeric compounds comprise or consist of an oligonucleotide comprising a portion that is complementary to a target nucleic acid, wherein the target nucleic acid is expressed in a pharmacologically relevant tissue. In certain embodiments, the pharmacologically relevant tissues are the cells and tissues that comprise the central nervous system (CNS). Such tissues include brain tissues, such as, cerebral cortex.

### IV. Certain Pharmaceutical Compositions

[0251] In certain embodiments, described herein are pharmaceutical compositions comprising one or more oligomeric compounds. In certain embodiments, the one or more oligomeric compounds each consists of a modified oligonucleotide. In certain embodiments, the pharmaceutical composition comprises a pharmaceutically acceptable diluent or carrier. In certain embodiments, a pharmaceutical composition comprises or consists of a sterile saline solution and one or more oligomeric compound. In certain embodiments, the sterile saline is pharmaceutical grade saline. In certain embodiments, a pharmaceutical composition comprises or consists of one or more oligomeric compound and sterile water. In certain embodiments, the sterile water is pharmaceutical grade water. In certain embodiments, a pharmaceutical composition comprises or consists of one or more oligomeric compound and phosphate-buffered saline (PBS). In certain embodiments, the sterile PBS is pharmaceutical grade PBS. In certain embodiments, a pharmaceutical composition comprises or consists of one or more oligomeric compound and artificial cerebrospinal fluid (“artificial CSF” or “aCSF”). In certain embodiments, the artificial cerebrospinal fluid is pharmaceutical grade.

[0252] In certain embodiments, a pharmaceutical composition comprises a modified oligonucleotide and artificial cerebrospinal fluid. In certain embodiments, a pharmaceutical composition consists of a modified oligonucleotide and artificial cerebrospinal fluid. In certain embodiments, a pharmaceutical composition consists essentially of a modified oligonucleotide and artificial cerebrospinal fluid. In certain embodiments, the artificial cerebrospinal fluid is pharmaceutical grade.

[0253] In certain embodiments, pharmaceutical compositions comprise one or more oligomeric compound and one or more excipients. In certain embodiments, excipients are selected from water, salt solutions, alcohol, polyethylene glycols, gelatin, lactose, amylase, magnesium stearate, talc, silicic acid, viscous paraffin, hydroxymethylcellulose and polyvinylpyrrolidone.

[0254] In certain embodiments, oligomeric compounds may be admixed with pharmaceutically acceptable active and/or inert substances for the preparation of pharmaceutical compositions or formulations. Compositions and methods for the formulation of pharmaceutical compositions depend on a number of criteria, including, but not limited to, route of administration, extent of disease, or dose to be administered.

[0255] In certain embodiments, pharmaceutical compositions comprising an oligomeric compound encompass any pharmaceutically acceptable salts of the oligomeric compound, esters of the oligomeric compound, or salts of such esters. In certain embodiments, pharmaceutical compositions comprising oligomeric compounds comprising one or more oligonucleotide, upon administration to a subject, including a human, are capable of providing (directly or indirectly) the biologically active metabolite or residue thereof. Accordingly, for example, the disclosure is also drawn to pharmaceutically acceptable salts of oligomeric compounds, prodrugs, pharmaceutically acceptable salts of such prodrugs, and other bioequivalents. Suitable pharmaceutically acceptable salts include, but are not limited to, sodium and potassium salts. In certain embodiments, prodrugs comprise one or more conjugate group attached to an oligonucleotide, wherein the conjugate group is cleaved by endogenous nucleases within the body. In certain embodiments, prodrugs comprise one or more conjugate group attached to an oligonucleotide, wherein the conjugate group is cleaved by endogenous nucleases within the body.

[0256] Lipid moieties have been used in nucleic acid therapies in a variety of methods. In certain such methods, the nucleic acid, such as an oligomeric compound, is introduced into preformed liposomes or lipoplexes made of mixtures of cationic lipids and neutral lipids. In certain methods, DNA complexes with mono- or poly-cationic lipids are formed without the presence of a neutral lipid. In certain embodiments, a lipid moiety is selected to increase distribution of a pharmaceutical agent to a particular cell or tissue. In certain embodiments, a lipid moiety is selected to increase distribution of a pharmaceutical agent to fat tissue. In certain embodiments, a lipid moiety is selected to increase distribution of a pharmaceutical agent to muscle tissue.

[0257] In certain embodiments, pharmaceutical compositions comprise a delivery system. Examples of delivery systems include, but are not limited to, liposomes and emulsions. Certain delivery systems are useful for preparing certain pharmaceutical compositions including those comprising hydrophobic compounds. In certain embodiments, certain organic solvents such as dimethylsulfoxide are used.

[0258] In certain embodiments, pharmaceutical compositions comprise one or more tissue-specific delivery molecules designed to deliver the one or more pharmaceutical agents comprising an oligomeric compound provided herein to specific tissues or cell types. For example, in certain embodiments, pharmaceutical compositions include liposomes coated with a tissue-specific antibody.

[0259] In certain embodiments, pharmaceutical compositions comprise a co-solvent system. Certain of such co-solvent systems comprise, for example, benzyl alcohol, a nonpolar surfactant, a water-miscible organic polymer, and an aqueous phase. In certain embodiments, such co-solvent systems are used for hydrophobic compounds. A non-limiting example of such a co-solvent system is the VPD co-solvent system, which is a solution of absolute ethanol comprising 3% w/v benzyl alcohol, 8% w/v of the nonpolar surfactant Polysorbate 80™ and 65% w/v polyethylene glycol 300. The proportions of such co-solvent systems may be varied considerably without significantly altering their solubility and toxicity characteristics. Furthermore, the identity of co-solvent components may be varied: for example, other surfactants may be used instead of Polysorbate 80™; the fraction size of polyethylene glycol may be varied; other biocompatible polymers may replace polyethylene glycol, e.g., polyvinyl pyrrolidone; and other sugars or polysaccharides may substitute for dextrose.

[0260] In certain embodiments, pharmaceutical compositions are prepared for oral administration. In certain embodiments, pharmaceutical compositions are prepared for buccal administration. In certain embodiments, a pharmaceutical composition is prepared for administration by injection (e.g., intravenous, subcutaneous, intramuscular, intrathecal (IT), intracerebroventricular (ICV), etc.). In certain of such embodiments, a pharmaceutical composition comprises a carrier and is formulated in aqueous solution, such as water or physiologically compatible buffers such as Hanks's solution, Ringer's solution, or physiological saline buffer. In certain embodiments, other ingredients are included (e.g., ingredients that aid in solubility or serve as preservatives). In certain embodiments, injectable suspensions are prepared using appropriate liquid carriers, suspending agents and the like. Certain pharmaceutical compositions for injection are presented in unit dosage form, e.g., in ampoules or in multi-dose containers. Certain pharmaceutical compositions for injection are suspensions, solutions or emulsions in oily or aqueous vehicles, and may contain formulatory agents such as suspending, stabilizing and/or dispersing agents. Certain solvents suitable for use in pharmaceutical compositions for injection include, but are not limited to, lipophilic solvents and fatty oils, such as sesame oil, synthetic fatty acid esters, such as ethyl oleate or triglycerides, and liposomes.

[0261] Under certain conditions, certain compounds disclosed herein act as acids. Although such compounds may be drawn or described in protonated (free acid) form, or ionized and in association with a cation (salt) form, aqueous solutions of such compounds exist in equilibrium among such forms. For example, a phosphate linkage of an oligonucleotide in aqueous solution exists in equilibrium among free acid, anion and salt forms. Unless otherwise indicated, compounds described herein are intended to include all such forms. Moreover, certain oligonucleotides have several such linkages, each of which is in equilibrium. Thus, oligonucleotides in solution exist in an ensemble of forms at multiple positions all at equilibrium. The term “oligonucleotide” is intended to include all such forms. Drawn structures necessarily depict a single form. Nevertheless, unless otherwise indicated, such drawings are likewise intended to include corresponding forms. Herein, a structure depicting the free acid of a compound followed by the term “or a salt thereof” expressly includes all such forms that may be fully or partially protonated/de-protonated/in association with a cation. In certain instances, one or more specific cation is identified.

[0262] In certain embodiments, modified oligonucleotides or oligomeric compounds are in aqueous solution with sodium. In certain embodiments, modified oligonucleotides or oligomeric compounds are in aqueous solution with potassium. In certain embodiments, modified oligonucleotides or oligomeric compounds are in PBS. In certain embodiments, modified oligonucleotides or oligomeric compounds are in water. In certain such embodiments, the pH of the solution is adjusted with NaOH and/or HCl to achieve a desired pH.

[0263] Herein, certain specific doses are described. A dose may be in the form of a dosage unit. For clarity, a dose (or dosage unit) of a modified oligonucleotide or an oligomeric compound in milligrams indicates the mass of the free acid form of the modified oligonucleotide or oligomeric compound. As described above, in aqueous solution, the free acid is in equilibrium with anionic and salt forms. However, for the purpose of calculating dose, it is assumed that the modified oligonucleotide or oligomeric compound exists as a solvent-free, sodium-acetate free, anhydrous, free acid. For example, where a modified oligonucleotide or an oligomeric compound is in solution comprising sodium (e.g., saline), the modified oligonucleotide or oligomeric compound may be partially or fully de-protonated and in association with Na+ ions. However, the mass of the protons are nevertheless counted toward the weight of the dose, and the mass of the Na+ ions are not counted toward the weight of the dose. Thus, for example, a dose, or dosage unit, of 10 mg of Compound No. 1429226, equals the number of fully protonated molecules that weighs 10 mg. This would be equivalent to 10.5 mg of solvent-free, sodium acetate-free, anhydrous sodiated Compound No. 1429226. When an oligomeric compound comprises a conjugate group, the mass of the conjugate group is included in calculating the dose of such oligomeric compound. If the conjugate group also has an acid, the conjugate group is likewise assumed to be fully protonated for the purpose of calculating dose.

### V. Certain Compositions

[0264] 1. Compound No: 1429226

[0265] In certain embodiments, Compound No. 1429226 is characterized as a modified oligonucleotide having a sequence of (from 5′ to 3′) AGTTGGAGCAAGATTATC (SEQ ID NO: 41), wherein each nucleoside comprises a 2′-NMA sugar moiety, each intemucleoside linkage is a phosphorothioate internucleoside linkage, and each cytosine is a 5-methyl cytosine.

[0266] In certain embodiments, Compound No. 1429226 is represented by the following chemical notation (5′ to 3′): Aₙₛ Gₙₛ Tₙₛ Tₙₛ Gₙₛ Gₙₛ Aₙₛ Gₙₛ^{m}Cₙₛ Aₙₛ Aₙₛ Gₙₛ Aₙₛ Tₙₛ Tₙₛ Aₙₛ Tₙₛ^{m}Cₙ (SEQ ID NO: 41);

[0267] wherein,

[0268] A=an adenine nucleobase,

[0269] ^{m}C=a 5-methyl cytosine nucleobase,

[0270] G=a guanine nucleobase,

[0271] T=a thymine nucleobase,

[0272] n=a 2′-NMA sugar moiety, and

[0273] s=a phosphorothioate internucleoside linkage.

[0274] In certain embodiments, Compound No. 1429226 is represented by the following chemical structure:

[chemical structure]

### Structure 1. Compound No. 1429226

[0275] In certain embodiments, the sodium salt of Compound No. 1429226 is represented by the following chemical

structure:

[chemical structure]

### Structure 2. The Sodium Salt of Compound No. 1429226

### Nonlimiting Disclosure and Incorporation by Reference

[0276] Each of the literature and patent publications listed herein is incorporated by reference in its entirety. While certain compounds, compositions and methods described herein have been described with specificity in accordance with certain embodiments, the following examples serve only to illustrate the compounds described herein and are not intended to limit the same. Each of the references, GenBank accession numbers, and the like recited in the present application is incorporated herein by reference in its entirety.

[0277] Although the sequence listing accompanying this filing identifies each sequence as either “RNA” or “DNA” as required, in reality, those sequences may be modified with any combination of chemical modifications. One of skill in the art will readily appreciate that such designation as “RNA” or “DNA” to describe modified oligonucleotides is, in certain instances, arbitrary. For example, an oligonucleotide comprising a nucleoside comprising a 2′-OH sugar moiety and a thymine base could be described as a DNA having a modified sugar moiety (2′-OH in place of one 2′-H of DNA) or as an RNA having a modified base (thymine (methylated uracil) in place of a uracil of RNA). Accordingly, nucleic acid sequences provided herein, including, but not limited to those in the sequence listing, are intended to encompass nucleic acids containing any combination of natural or modified RNA and/or DNA, including, but not limited to such nucleic acids having modified nucleobases. By way of further example and without limitation, an oligomeric compound having the nucleobase sequence “ATCGATCG” encompasses any oligomeric compounds having such nucleobase sequence, whether modified or unmodified, including, but not limited to, such compounds comprising RNA bases, such as those having sequence “AUCGAUCG” and those having some DNA bases and some RNA bases such as “AUCGATCG” and oligomeric compounds having other modified nucleobases, such as “AT^{m}CGAUCG,” wherein ^{m}C indicates a cytosine base comprising a methyl group at the 5-position.

[0278] Certain compounds described herein (e.g., modified oligonucleotides) have one or more asymmetric center and thus give rise to enantiomers, diastereomers, and other stereoisomeric configurations that may be defined, in terms of absolute stereochemistry, as (R) or (S), as a or 3 such as for sugar anomers, or as (D) or (L), such as for amino acids, etc. Compounds provided herein that are drawn or described as having certain stereoisomeric configurations include only the indicated compounds. Compounds provided herein that are drawn or described with undefined stereochemistry include all such possible isomers, including their stereorandom and optically pure forms, unless specified otherwise. Likewise, all cis- and trans-isomers and tautomeric forms of the compounds herein are also included unless otherwise indicated. Oligomeric compounds described herein include chirally pure or enriched mixtures as well as racemic mixtures. For example, oligomeric compounds having a plurality of phosphorothioate internucleoside linkages include such compounds in which chirality of the phosphorothioate intemucleoside linkages is controlled or is random. Unless otherwise indicated, compounds described herein are intended to include corresponding salt forms.

[0279] The compounds described herein include variations in which one or more atoms are replaced with a non-radioactive isotope or radioactive isotope of the indicated element. For example, compounds herein that comprise hydrogen atoms encompass all possible deuterium substitutions for each of the ¹H hydrogen atoms. Isotopic substitutions encompassed by the compounds herein include but are not limited to: ²H or ³H in place of ¹H, ¹³C or ¹⁴C in place of ¹²C, ¹⁵N in place of ¹⁴N, ¹⁷O or ¹⁸O in place of ¹⁶O and ³³S, ³⁴S, ³⁵S, or ³⁶S in place of ³²S. In certain embodiments, non-radioactive isotopic substitutions may impart new properties on the oligomeric compound that are beneficial for use as a therapeutic or research tool. In certain embodiments, radioactive isotopic substitutions may make the compound suitable for research or diagnostic purposes such as imaging.

### EXAMPLES

[0280] The following examples illustrate certain embodiments of the present disclosure and are not limiting. Moreover, where specific embodiments are provided, the inventors have contemplated generic application of those specific embodiments.

### Example 1: Activity of Modified Oligonucleotides Targeting Human SCN1A in HepG2 Cells, Single Dose, In Vitro

[0281] Modified oligonucleotides complementary to a human SCN1A nucleic acid were synthesized and tested for their effect on SCN1A RNA levels in vitro. The modified oligonucleotides were tested in a series of experiments using the same culture conditions.

[0282] The modified oligonucleotides in the tables below are 18 nucleosides in length. Each nucleoside comprises a 2′-MOE sugar moiety. The intemucleoside linkages throughout each modified oligonucleotide are phosphorothioate internucleoside linkages. All cytosine nucleobases throughout each modified oligonucleotide are 5-methylcytosines.

[0283] Each modified oligonucleotide listed in the tables below is 100% complementary to either the human SCN1A genomic sequence, designated herein as SEQ ID NO: 1 (the complement of GENBANK Accession No. NC_000002.12 truncated from nucleotides 165982001 to 166152000) or to the human SCN1A mRNA, designated herein as SEQ ID NO: 2 (GENBANK Accession No. NM_001165963.2) or to both. ‘N/A’ indicates that the modified oligonucleotide is not complementary to that particular target sequence with 100% complementarity. “Start site” indicates the 5′-most nucleoside of the target sequence to which the modified oligonucleotide is complementary. “Stop site” indicates the 3′-most nucleoside of the target sequence to which the modified oligonucleotide is complementary.

[0284] Cultured HepG2 cells at a density of 20,000 cells per well were transfected using electroporation with 4000 nM of modified oligonucleotide. After a treatment period of approximately 24 hours, RNA was isolated from the cells and SCN1A RNA levels were measured by quantitative real-time RTPCR. Human primer probe set RTS40976 (forward sequence CCAAGAAGGCTGGAATATCTTTG, designated herein as SEQ ID NO: 15; reverse sequence GCCAACTTGAAAACTCGCA, designated herein as SEQ ID NO: 16; probe sequence ACCAGGCTAAGCGTCACAATAAAACCG, designated herein as SEQ ID NO: 17) was used to measure SCN1A RNA levels. SCN1A RNA levels were normalized to total RNA content, as measured by RIBOGREEN@. SCN1A RNA is presented as % of the average of untreated control (% UTC). As shown in the tables below, certain modified oligonucleotides complementary to SCN1A RNA increased the amount of human SCN1A RNA compared to untreated control. Each of Tables 1-6 represents a different experiment.

TABLE 1
Effect of modified oligonucleotides on amount of human SCNIA RNA
in HepG2 cells

| | SEQ | SEQ | SEQ | SEQ | | | |
|---|---|---|---|---|---|---|---|
| | ID | ID | ID | ID | | | |
| | NO: 1 | NO: 1 | NO: 2 | NO: 2 | | SCNIA | SEQ |
| Compound | Start | Stop | Start | Stop | | (% | ID |
| Number | Site | Site | Site | Site | Sequence (5′ to 3′) | UTC) | No. |
| 1262739 | 2869 | 2886 | N/A | N/A | AACAGTTCCATGAGTTTC | 57 | 42 |
| 1262745 | 2875 | 2892 | N/A | N/A | TGGAGGAACAGTTCCATG | 90 | 43 |
| 1262751 | 2881 | 2898 | N/A | N/A | TTAATCTGGAGGAACAGT | 130 | 44 |
| 1262757 | 2887 | 2904 | N/A | N/A | GAAGTGTTAATCTGGAGG | 129 | 45 |
| 1262763 | 2893 | 2910 | N/A | N/A | ACCCCTGAAGTGTTAATC | 93 | 46 |
| 1262769 | 2899 | 2916 | N/A | N/A | TCCATAACCCCTGAAGTG | 89 | 47 |
| 1262775 | 2905 | 2922 | N/A | N/A | CCAGCTTCCATAACCCCT | 87 | 48 |
| 1262781 | 2912 | 2929 | N/A | N/A | GCTTCCTCCAGCTTCCAT | 54 | 49 |
| 1262787 | 2925 | 2942 | N/A | N/A | TAGTAAAAGCTCAGCTTC | 75 | 50 |
| 1262793 | 2931 | 2948 | N/A | N/A | AAGATGTAGTAAAAGCTC | 108 | 51 |
| 1262799 | 78339 | 78356 | 457 | 474 | TACCATTTATTCTGCATA | 79 | 52 |
| 1262805 | 78359 | 78376 | 477 | 494 | GTCATCCTGCACATTTTA | 84 | 53 |
| 1262811 | 160818 | 160835 | 6589 | 6606 | AGGAGTCCTGTTGATAAA | 102 | 54 |
| 1262817 | 160825 | 160842 | 6596 | 6613 | CTCCTAAAGGAGTCCTGT | 66 | 55 |
| 1262823 | 160839 | 160856 | 6610 | 6627 | AGTTTGGCATTGACCTCC | 54 | 56 |
| 1262829 | 160874 | 160891 | 6645 | 6662 | GCACTGACCTTAAGGAGA | 126 | 57 |
| 1262835 | 160884 | 160901 | 6655 | 6672 | CTTATTGTAGGCACTGAC | 69 | 58 |
| 1262841 | 160927 | 160944 | 6698 | 6715 | CCCCTTTACACAGAGTCA | 61 | 59 |
| 1262847 | 160954 | 160971 | 6725 | 6742 | AACAGTAACCTCCTGTCA | 85 | 60 |
| 1262853 | 160966 | 160983 | 6737 | 6754 | GCTGGTAGTGAGAACAGT | 93 | 61 |
| 1262859 | 160974 | 160991 | 6745 | 6762 | CAGTGTCAGCTGGTAGTG | 84 | 62 |
| 1262865 | 161002 | 161019 | 6773 | 6790 | GACTAGCCATTGTGCATC | 113 | 63 |
| 1262871 | 161008 | 161025 | 6779 | 6796 | CAGTCTGACTAGCCATTG | 74 | 64 |
| 1262877 | 161014 | 161031 | 6785 | 6802 | TCCCTACAGTCTGACTAG | 72 | 65 |
| 1262883 | 161020 | 161037 | 6791 | 6808 | AACTGGTCCCTACAGTCT | 73 | 66 |
| 1262889 | 161031 | 161048 | 6802 | 6819 | GCACCCCTTGAAACTGGT | 114 | 67 |
| 1262895 | 161037 | 161054 | 6808 | 6825 | AGGTTTGCACCCCTTGAA | 85 | 68 |
| 1262901 | 161087 | 161104 | 6858 | 6875 | GATACAATTACTACACTA | 81 | 69 |
| 1262907 | 161150 | 161167 | 6921 | 6938 | GATGAATCCACTAACAGA | 32 | 70 |
| 1262913 | 161231 | 161248 | 7002 | 7019 | TAGAGGTCCTTAGCCTAT | 75 | 71 |
| 1262919 | 161241 | 161258 | 7012 | 7029 | ATACCTGTTATAGAGGTC | 74 | 72 |
| 1262925 | 161247 | 161264 | 7018 | 7035 | GGTGGCATACCTGTTATA | 62 | 73 |
| 1262931 | 161258 | 161275 | 7029 | 7046 | CATACCCCCCAGGTGGCA | 70 | 74 |
| 1262937 | 161264 | 161281 | 7035 | 7052 | GGTTGCCATACCCCCCAG | 40 | 75 |
| 1262943 | 161270 | 161287 | 7041 | 7058 | CCATGTGGTTGCCATACC | 72 | 76 |
| 1262949 | 161293 | 161310 | 7064 | 7081 | ACGACTTTGTGTAGCTGG | 90 | 77 |
| 1262955 | 161299 | 161316 | 7070 | 7087 | CAAACCACGACTTTGTGT | 57 | 78 |
| 1262961 | 161305 | 161322 | 7076 | 7093 | CTCATGCAAACCACGACT | 61 | 79 |
| 1262967 | 161313 | 161330 | 7084 | 7101 | AGCATGCCCTCATGCAAA | 53 | 80 |
| 1262973 | 161319 | 161336 | 7090 | 7107 | AAGTGCAGCATGCCCTCA | 135 | 81 |
| 1262979 | 161326 | 161343 | 7097 | 7114 | GATCTCTAAGTGCAGCAT | 76 | 82 |
| 1262985 | 161400 | 161417 | 7171 | 7188 | ATCACCCAATTACCCCTC | 56 | 83 |
| 1262991 | 161406 | 161423 | 7177 | 7194 | CCACTTATCACCCAATTA | 27 | 84 |
| 1262997 | 161412 | 161429 | 7183 | 7200 | GCACCTCCACTTATCACC | 83 | 85 |
| 1263003 | 161439 | 161456 | 7210 | 7227 | TGGATTTCGCAAAACAAG | 57 | 86 |
| 1263009 | 161461 | 161478 | 7232 | 7249 | ATAATCTACTTGGTCTAG | 81 | 87 |
| 1263015 | 161477 | 161494 | 7248 | 7265 | ACTGGCCTACCCACAAAT | 67 | 88 |
| 1263021 | 161483 | 161500 | 7254 | 7271 | AGATTTACTGGCCTACCC | 104 | 89 |
| 1263027 | 161495 | 161512 | 7266 | 7283 | TTGCACCTGCTAAGATTT | 101 | 90 |
| 1263033 | 161501 | 161518 | 7272 | 7289 | TGAAGTTTGCACCTGCTA | 115 | 91 |
| 1263039 | 161601 | 161618 | 7372 | 7389 | GTCTTCTGGCGGTGGAGG | 83 | 92 |
| 1263045 | 161607 | 161624 | 7378 | 7395 | AATTCAGTCTTCTGGCGG | 65 | 93 |
| 1263051 | 161667 | 161684 | 7438 | 7455 | CCGAAGATGGCTAAACAA | 51 | 94 |
| 1263057 | 161673 | 161690 | 7444 | 7461 | TGAGAGCCGAAGATGGCT | 64 | 95 |
| 1263063 | 161680 | 161697 | 7451 | 7468 | ACCTTGCTGAGAGCCGAA | 66 | 96 |
| 1263069 | 161690 | 161707 | 7461 | 7478 | TACAGTGTCAACCTTGCT | 113 | 97 |
| 1263075 | 161743 | 161760 | 7514 | 7531 | GCACCACAGGGTAAAATG | 58 | 98 |
| 1263081 | 161779 | 161796 | 7550 | 7567 | TACTGTGCTTAGGTCATT | 83 | 99 |
| 1263087 | 161828 | 161845 | 7599 | 7616 | GTAAAGCTTGCACTCTAC | 87 | 100 |
| 1263093 | 161836 | 161853 | 7607 | 7624 | TTACCTGTGTAAAGCTTG | 40 | 101 |
| 1263099 | 161879 | 161896 | 7650 | 7667 | GATAGCATCCAAACTATC | 89 | 102 |
| 1263105 | 161887 | 161904 | 7658 | 7675 | CATGCATTGATAGCATCC | 87 | 103 |
| 1263111 | 161965 | 161982 | 7736 | 7753 | TACCACTGACATATGGTT | 71 | 104 |
| 1263117 | 162030 | 162047 | 7801 | 7818 | AAGTGCTGCAAACTATTG | 97 | 105 |
| 1263123 | 162092 | 162109 | 7863 | 7880 | ACAGTCTGGCTATATACC | 109 | 106 |
| 1263129 | 162098 | 162115 | 7869 | 7886 | GTCTGTACAGTCTGGCTA | 75 | 107 |
| 1263135 | 162129 | 162146 | 7900 | 7917 | AATAGGTTAAGCAGTGTG | 66 | 108 |
| 1263141 | 162249 | 162266 | 8020 | 8037 | ATTGTGATATCAACCTGA | 65 | 109 |
| 1263147 | 162337 | 162354 | 8108 | 8125 | AATCTACAACTACCCAGT | 82 | 110 |
| 1263153 | 162482 | 162499 | 8253 | 8270 | TAGTGCAGGTACTACCAG | 75 | ill |
| 1263159 | 162488 | 162505 | 8259 | 8276 | TTCAGTTAGTGCAGGTAC | 84 | 112 |
| 1263165 | 162501 | 162518 | 8272 | 8289 | GCACTACCTTCAATTCAG | 88 | 113 |
| 1263171 | 162578 | 162595 | 8349 | 8366 | AACAATCTAGAGCAGCAT | 105 | 114 |
| 1263177 | 162638 | 162655 | 8409 | 8426 | TATAAGTTGACTACTCTG | 71 | 115 |
| 1263183 | 162656 | 162673 | 8427 | 8444 | TCCTGATGTAATTGACTA | 54 | 116 |
| 1263189 | 162696 | 162713 | 8467 | 8484 | AGAGGAGCCTATGGTTTG | 76 | 117 |
| 1263195 | 162735 | 162752 | 8506 | 8523 | AGTTCACGAATACAGTTT | 51 | 118 |
| 1263201 | 162741 | 162758 | 8512 | 8529 | GCATGCAGTTCACGAATA | 87 | 119 |

TABLE 2
Effect of modified oligonucleotides on amount of human SCNIA RNA
in HepG2 cells

| | SEQ | SEQ | | | | | |
|---|---|---|---|---|---|---|---|
| | ID | ID | SEQ | SEQ | | | |
| | NO: 1 | NO: 1 | ID NO: | ID NO: | | SCNIA | SEQ |
| Compound | Start | Stop | 2 Start | 2 Stop | | (% | ID |
| Number | Site | Site | Site | Site | Sequence (5′ to 3′) | UTC) | No. |
| 1262740 | 2870 | 2887 | N/A | N/A | GAACAGTTCCATGAGTTT | 62 | 120 |
| 1262746 | 2876 | 2893 | N/A | N/A | CTGGAGGAACAGTTCCAT | 82 | 121 |
| 1262752 | 2882 | 2899 | N/A | N/A | GTTAATCTGGAGGAACAG | 92 | 122 |
| 1262758 | 2888 | 2905 | N/A | N/A | TGAAGTGTTAATCTGGAG | 71 | 123 |
| 1262764 | 2894 | 2911 | N/A | N/A | AACCCCTGAAGTGTTAAT | 83 | 124 |
| 1262770 | 2900 | 2917 | N/A | N/A | TTCCATAACCCCTGAAGT | 112 | 125 |
| 1262776 | 2906 | 2923 | N/A | N/A | TCCAGCTTCCATAACCCC | 82 | 126 |
| 1262782 | 2919 | 2936 | N/A | N/A | AAGCTCAGCTTCCTCCAG | 70 | 127 |
| 1262788 | 2926 | 2943 | N/A | N/A | GTAGTAAAAGCTCAGCTT | 82 | 128 |
| 1262794 | 2932 | 2949 | N/A | N/A | AAAGATGTAGTAAAAGCT | 75 | 129 |
| 1262800 | 78342 | 78359 | 460 | 477 | AATTACCATTTATTCTGC | 37 | 130 |
| 1262806 | 78360 | 78377 | 478 | 495 | TGTCATCCTGCACATTTT | 124 | 131 |
| 1262812 | 160819 | 160836 | 6590 | 6607 | AAGGAGTCCTGTTGATAA | 58 | 132 |
| 1262818 | 160828 | 160845 | 6599 | 6616 | GACCTCCTAAAGGAGTCC | 66 | 133 |
| 1262824 | 160840 | 160857 | 6611 | 6628 | CAGTTTGGCATTGACCTC | 54 | 134 |
| 1262830 | 160879 | 160896 | 6650 | 6667 | TGTAGGCACTGACCTTAA | 72 | 135 |
| 1262836 | 160885 | 160902 | 6656 | 6673 | TCTTATTGTAGGCACTGA | 63 | 136 |
| 1262842 | 160949 | 160966 | 6720 | 6737 | TAACCTCCTGTCAAGGTC | 88 | 137 |
| 1262848 | 160955 | 160972 | 6726 | 6743 | GAACAGTAACCTCCTGTC | 55 | 138 |
| 1262854 | 160969 | 160986 | 6740 | 6757 | TCAGCTGGTAGTGAGAAC | 113 | 139 |
| 1262860 | 160991 | 161008 | 6762 | 6779 | GTGCATCTTATCTTCAGC | 109 | 140 |
| 1262866 | 161003 | 161020 | 6774 | 6791 | TGACTAGCCATTGTGCAT | 54 | 141 |
| 1262872 | 161009 | 161026 | 6780 | 6797 | ACAGTCTGACTAGCCATT | 92 | 142 |
| 1262878 | 161015 | 161032 | 6786 | 6803 | GTCCCTACAGTCTGACTA | 129 | 143 |
| 1262884 | 161021 | 161038 | 6792 | 6809 | AAACTGGTCCCTACAGTC | 87 | 144 |
| 1262890 | 161032 | 161049 | 6803 | 6820 | TGCACCCCTTGAAACTGG | 92 | 145 |
| 1262896 | 161038 | 161055 | 6809 | 6826 | CAGGTTTGCACCCCTTGA | 65 | 146 |
| 1262902 | 161088 | 161105 | 6859 | 6876 | GGATACAATTACTACACT | 79 | 147 |
| 1262908 | 161151 | 161168 | 6922 | 6939 | AGATGAATCCACTAACAG | 44 | 148 |
| 1262914 | 161232 | 161249 | 7003 | 7020 | ATAGAGGTCCTTAGCCTA | 54 | 149 |
| 1262920 | 161242 | 161259 | 7013 | 7030 | CATACCTGTTATAGAGGT | 106 | 150 |
| 1262926 | 161248 | 161265 | 7019 | 7036 | AGGTGGCATACCTGTTAT | 78 | 151 |
| 1262932 | 161259 | 161276 | 7030 | 7047 | CCATACCCCCCAGGTGGC | 88 | 152 |
| 1262938 | 161265 | 161282 | 7036 | 7053 | TGGTTGCCATACCCCCCA | 41 | 153 |
| 1262944 | 161271 | 161288 | 7042 | 7059 | GCCATGTGGTTGCCATAC | 73 | 154 |
| 1262950 | 161294 | 161311 | 7065 | 7082 | CACGACTTTGTGTAGCTG | 63 | 155 |
| 1262956 | 161300 | 161317 | 7071 | 7088 | GCAAACCACGACTTTGTG | 48 | 156 |
| 1262962 | 161306 | 161323 | 7077 | 7094 | CCTCATGCAAACCACGAC | 68 | 157 |
| 1262968 | 161314 | 161331 | 7085 | 7102 | CAGCATGCCCTCATGCAA | 77 | 158 |
| 1262974 | 161320 | 161337 | 7091 | 7108 | TAAGTGCAGCATGCCCTC | 80 | 159 |
| 1262980 | 161328 | 161345 | 7099 | 7116 | ATGATCTCTAAGTGCAGC | 114 | 160 |
| 1262986 | 161401 | 161418 | 7172 | 7189 | TATCACCCAATTACCCCT | 59 | 161 |
| 1262992 | 161407 | 161424 | 7178 | 7195 | TCCACTTATCACCCAATT | 65 | 162 |
| 1262998 | 161413 | 161430 | 7184 | 7201 | AGCACCTCCACTTATCAC | 139 | 163 |
| 1263004 | 161441 | 161458 | 7212 | 7229 | GCTGGATTTCGCAAAACA | 84 | 164 |
| 1263010 | 161462 | 161479 | 7233 | 7250 | AATAATCTACTTGGTCTA | 83 | 165 |
| 1263016 | 161478 | 161495 | 7249 | 7266 | TACTGGCCTACCCACAAA | 47 | 166 |
| 1263022 | 161484 | 161501 | 7255 | 7272 | AAGATTTACTGGCCTACC | 63 | 167 |
| 1263028 | 161496 | 161513 | 7267 | 7284 | TTTGCACCTGCTAAGATT | 68 | 168 |
| 1263034 | 161502 | 161519 | 7273 | 7290 | ATGAAGTTTGCACCTGCT | 75 | 169 |
| 1263040 | 161602 | 161619 | 7373 | 7390 | AGTCTTCTGGCGGTGGAG | 61 | 170 |
| 1263046 | 161608 | 161625 | 7379 | 7396 | CAATTCAGTCTTCTGGCG | 73 | 171 |
| 1263052 | 161668 | 161685 | 7439 | 7456 | GCCGAAGATGGCTAAACA | 102 | 172 |
| 1263058 | 161674 | 161691 | 7445 | 7462 | CTGAGAGCCGAAGATGGC | 83 | 173 |
| 1263064 | 161681 | 161698 | 7452 | 7469 | AACCTTGCTGAGAGCCGA | 109 | 174 |
| 1263070 | 161691 | 161708 | 7462 | 7479 | ATACAGTGTCAACCTTGC | 93 | 175 |
| 1263076 | 161744 | 161761 | 7515 | 7532 | TGCACCACAGGGTAAAAT | 53 | 176 |
| 1263082 | 161780 | 161797 | 7551 | 7568 | ATACTGTGCTTAGGTCAT | 52 | 177 |
| 1263088 | 161829 | 161846 | 7600 | 7617 | TGTAAAGCTTGCACTCTA | 48 | 178 |
| 1263094 | 161867 | 161884 | 7638 | 7655 | ACTATCTATAAATGGTAC | 135 | 179 |
| 1263100 | 161880 | 161897 | 7651 | 7668 | TGATAGCATCCAAACTAT | 56 | 180 |
| 1263106 | 161888 | 161905 | 7659 | 7676 | ACATGCATTGATAGCATC | 29 | 181 |
| 1263112 | 161966 | 161983 | 7737 | 7754 | TTACCACTGACATATGGT | 42 | 182 |
| 1263118 | 162039 | 162056 | 7810 | 7827 | AAGCTGTTAAAGTGCTGC | 53 | 183 |
| 1263124 | 162093 | 162110 | 7864 | 7881 | TACAGTCTGGCTATATAC | 118 | 184 |
| 1263130 | 162099 | 162116 | 7870 | 7887 | TGTCTGTACAGTCTGGCT | 34 | 185 |
| 1263136 | 162130 | 162147 | 7901 | 7918 | TAATAGGTTAAGCAGTGT | 129 | 186 |
| 1263142 | 162250 | 162267 | 8021 | 8038 | GATTGTGATATCAACCTG | 53 | 187 |
| 1263148 | 162405 | 162422 | 8176 | 8193 | GTGAACCTATTTTGCTCC | 57 | 188 |
| 1263154 | 162483 | 162500 | 8254 | 8271 | TTAGTGCAGGTACTACCA | 72 | 189 |
| 1263160 | 162489 | 162506 | 8260 | 8277 | ATTCAGTTAGTGCAGGTA | 130 | 190 |
| 1263166 | 162510 | 162527 | 8281 | 8298 | ATAACATAAGCACTACCT | 75 | 191 |
| 1263172 | 162579 | 162596 | 8350 | 8367 | GAACAATCTAGAGCAGCA | 76 | 192 |
| 1263178 | 162641 | 162658 | 8412 | 8429 | CTATATAAGTTGACTACT | 81 | 193 |
| 1263184 | 162657 | 162674 | 8428 | 8445 | GTCCTGATGTAATTGACT | 78 | 194 |
| 1263190 | 162729 | 162746 | 8500 | 8517 | CGAATACAGTTTATCTAA | 122 | 195 |
| 1263196 | 162736 | 162753 | 8507 | 8524 | CAGTTCACGAATACAGTT | 103 | 196 |
| 1263202 | 162742 | 162759 | 8513 | 8530 | AGCATGCAGTTCACGAAT | 98 | 197 |

TABLE 3
Effect of modified oligonucleotides on amount of human SCNIA RNA
in HepG2 cells

| | | SEQ | | | | | |
|---|---|---|---|---|---|---|---|
| | SEQ ID | ID | SEQ | SEQ | | | |
| | NO: 1 | NO: 1 | ID NO: | ID NO: | | SCNIA | SEQ |
| Compound | Start | Stop | 2 Start | 2 Stop | | (% | ID |
| Number | Site | Site | Site | Site | Sequence (5′ to 3′) | UTC) | No. |
| 1262741 | 2871 | 2888 | N/A | N/A | GGAACAGTTCCATGAGTT | 99 | 198 |
| 1262747 | 2877 | 2894 | N/A | N/A | TCTGGAGGAACAGTTCCA | 28 | 199 |
| 1262753 | 2883 | 2900 | N/A | N/A | TGTTAATCTGGAGGAACA | 60 | 200 |
| 1262759 | 2889 | 2906 | N/A | N/A | CTGAAGTGTTAATCTGGA | 78 | 201 |
| 1262765 | 2895 | 2912 | N/A | N/A | TAACCCCTGAAGTGTTAA | 119 | 202 |
| 1262771 | 2901 | 2918 | N/A | N/A | CTTCCATAACCCCTGAAG | 61 | 203 |
| 1262777 | 2907 | 2924 | N/A | N/A | CTCCAGCTTCCATAACCC | 147 | 204 |
| 1262783 | 2920 | 2937 | N/A | N/A | AAAGCTCAGCTTCCTCCA | 56 | 205 |
| 1262789 | 2927 | 2944 | N/A | N/A | TGTAGTAAAAGCTCAGCT | 125 | 206 |
| 1262795 | 2936 | 2953 | N/A | N/A | CCCAAAAGATGTAGTAAA | 56 | 207 |
| 1262801 | 78351 | 78368 | 469 | 486 | GCACATTTTAATTACCAT | 83 | 208 |
| 1262807 | 78361 | 78378 | 479 | 496 | TTGTCATCCTGCACATTT | 92 | 209 |
| 1262813 | 160820 | 160837 | 6591 | 6608 | AAAGGAGTCCTGTTGATA | 76 | 210 |
| 1262819 | 160829 | 160846 | 6600 | 6617 | TGACCTCCTAAAGGAGTC | 115 | 211 |
| 1262825 | 160841 | 160858 | 6612 | 6629 | TCAGTTTGGCATTGACCT | 60 | 212 |
| 1262831 | 160880 | 160897 | 6651 | 6668 | TTGTAGGCACTGACCTTA | 45 | 213 |
| 1262837 | 160886 | 160903 | 6657 | 6674 | GTCTTATTGTAGGCACTG | 62 | 214 |
| 1262843 | 160950 | 160967 | 6721 | 6738 | GTAACCTCCTGTCAAGGT | 60 | 215 |
| 1262849 | 160957 | 160974 | 6728 | 6745 | GAGAACAGTAACCTCCTG | 61 | 216 |
| 1262855 | 160970 | 160987 | 6741 | 6758 | GTCAGCTGGTAGTGAGAA | 104 | 217 |
| 1262861 | 160996 | 161013 | 6767 | 6784 | CCATTGTGCATCTTATCT | 66 | 218 |
| 1262867 | 161004 | 161021 | 6775 | 6792 | CTGACTAGCCATTGTGCA | 48 | 219 |
| 1262873 | 161010 | 161027 | 6781 | 6798 | TACAGTCTGACTAGCCAT | 57 | 220 |
| 1262879 | 161016 | 161033 | 6787 | 6804 | GGTCCCTACAGTCTGACT | 92 | 221 |
| 1262885 | 161022 | 161039 | 6793 | 6810 | GAAACTGGTCCCTACAGT | 64 | 222 |
| 1262891 | 161033 | 161050 | 6804 | 6821 | TTGCACCCCTTGAAACTG | 108 | 223 |
| 1262897 | 161039 | 161056 | 6810 | 6827 | ACAGGTTTGCACCCCTTG | 74 | 224 |
| 1262903 | 161089 | 161106 | 6860 | 6877 | TGGATACAATTACTACAC | 58 | 225 |
| 1262909 | 161227 | 161244 | 6998 | 7015 | GGTCCTTAGCCTATTTCT | 59 | 226 |
| 1262915 | 161233 | 161250 | 7004 | 7021 | TATAGAGGTCCTTAGCCT | 32 | 227 |
| 1262921 | 161243 | 161260 | 7014 | 7031 | GCATACCTGTTATAGAGG | 107 | 228 |
| 1262927 | 161254 | 161271 | 7025 | 7042 | CCCCCCAGGTGGCATACC | 46 | 229 |
| 1262933 | 161260 | 161277 | 7031 | 7048 | GCCATACCCCCCAGGTGG | 66 | 230 |
| 1262939 | 161266 | 161283 | 7037 | 7054 | GTGGTTGCCATACCCCCC | 65 | 231 |
| 1262945 | 161272 | 161289 | 7043 | 7060 | GGCCATGTGGTTGCCATA | 53 | 232 |
| 1262951 | 161295 | 161312 | 7066 | 7083 | CCACGACTTTGTGTAGCT | 88 | 233 |
| 1262957 | 161301 | 161318 | 7072 | 7089 | TGCAAACCACGACTTTGT | 57 | 234 |
| 1262963 | 161307 | 161324 | 7078 | 7095 | CCCTCATGCAAACCACGA | 61 | 235 |
| 1262969 | 161315 | 161332 | 7086 | 7103 | GCAGCATGCCCTCATGCA | 80 | 236 |
| 1262975 | 161321 | 161338 | 7092 | 7109 | CTAAGTGCAGCATGCCCT | 54 | 237 |
| 1262981 | 161333 | 161350 | 7104 | 7121 | CATGCATGATCTCTAAGT | 45 | 238 |
| 1262987 | 161402 | 161419 | 7173 | 7190 | TTATCACCCAATTACCCC | 75 | 239 |
| 1262993 | 161408 | 161425 | 7179 | 7196 | CTCCACTTATCACCCAAT | 107 | 240 |
| 1262999 | 161415 | 161432 | 7186 | 7203 | AAAGCACCTCCACTTATC | 113 | 241 |
| 1263005 | 161442 | 161459 | 7213 | 7230 | GGCTGGATTTCGCAAAAC | 96 | 242 |
| 1263011 | 161473 | 161490 | 7244 | 7261 | GCCTACCCACAAATAATC | 114 | 243 |
| 1263017 | 161479 | 161496 | 7250 | 7267 | TTACTGGCCTACCCACAA | 72 | 244 |
| 1263023 | 161485 | 161502 | 7256 | 7273 | TAAGATTTACTGGCCTAC | 53 | 245 |
| 1263029 | 161497 | 161514 | 7268 | 7285 | GTTTGCACCTGCTAAGAT | 46 | 246 |
| 1263035 | 161503 | 161520 | 7274 | 7291 | AATGAAGTTTGCACCTGC | 55 | 247 |
| 1263041 | 161603 | 161620 | 7374 | 7391 | CAGTCTTCTGGCGGTGGA | 58 | 248 |
| 1263047 | 161611 | 161628 | 7382 | 7399 | GGTCAATTCAGTCTTCTG | 76 | 249 |
| 1263053 | 161669 | 161686 | 7440 | 7457 | AGCCGAAGATGGCTAAAC | 35 | 250 |
| 1263059 | 161675 | 161692 | 7446 | 7463 | GCTGAGAGCCGAAGATGG | 56 | 251 |
| 1263065 | 161682 | 161699 | 7453 | 7470 | CAACCTTGCTGAGAGCCG | 36 | 252 |
| 1263071 | 161692 | 161709 | 7463 | 7480 | TATACAGTGTCAACCTTG | 44 | 253 |
| 1263077 | 161745 | 161762 | 7516 | 7533 | GTGCACCACAGGGTAAAA | 69 | 254 |
| 1263083 | 161781 | 161798 | 7552 | 7569 | AATACTGTGCTTAGGTCA | 79 | 255 |
| 1263089 | 161830 | 161847 | 7601 | 7618 | GTGTAAAGCTTGCACTCT | 63 | 256 |
| 1263095 | 161875 | 161892 | 7646 | 7663 | GCATCCAAACTATCTATA | 84 | 257 |
| 1263101 | 161881 | 161898 | 7652 | 7669 | TTGATAGCATCCAAACTA | 51 | 258 |
| 1263107 | 161891 | 161908 | 7662 | 7679 | TAAACATGCATTGATAGC | 68 | 259 |
| 1263113 | 161968 | 161985 | 7739 | 7756 | CTTTACCACTGACATATG | 162 | 260 |
| 1263119 | 162079 | 162096 | 7850 | 7867 | ATACCATATGTTATCCAC | 93 | 261 |
| 1263125 | 162094 | 162111 | 7865 | 7882 | GTACAGTCTGGCTATATA | 74 | 262 |
| 1263131 | 162101 | 162118 | 7872 | 7889 | CATGTCTGTACAGTCTGG | 76 | 263 |
| 1263137 | 162131 | 162148 | 7902 | 7919 | TTAATAGGTTAAGCAGTG | 115 | 264 |
| 1263143 | 162251 | 162268 | 8022 | 8039 | TGATTGTGATATCAACCT | 54 | 265 |
| 1263149 | 162406 | 162423 | 8177 | 8194 | CGTGAACCTATTTTGCTC | 62 | 266 |
| 1263155 | 162484 | 162501 | 8255 | 8272 | GTTAGTGCAGGTACTACC | 48 | 267 |
| 1263161 | 162490 | 162507 | 8261 | 8278 | AATTCAGTTAGTGCAGGT | 51 | 268 |
| 1263167 | 162541 | 162558 | 8312 | 8329 | CATAAACCGAAGTCAGAA | 63 | 269 |
| 1263173 | 162583 | 162600 | 8354 | 8371 | TTTAGAACAATCTAGAGC | 76 | 270 |
| 1263179 | 162642 | 162659 | 8413 | 8430 | ACTATATAAGTTGACTAC | 47 | 271 |
| 1263185 | 162692 | 162709 | 8463 | 8480 | GAGCCTATGGTTTGCTTC | 83 | 272 |
| 1263191 | 162730 | 162747 | 8501 | 8518 | ACGAATACAGTTTATCTA | 124 | 273 |
| 1263197 | 162737 | 162754 | 8508 | 8525 | GCAGTTCACGAATACAGT | 83 | 274 |
| 1263203 | 162743 | 162760 | 8514 | 8531 | CAGCATGCAGTTCACGAA | 79 | 275 |

TABLE 4
Effect of modified oligonucleotides on amount of human SCNIA RNA
in HepG2 cells

| | SEQ | SEQ | SEQ | SEQ | | | |
|---|---|---|---|---|---|---|---|
| | ID | ID | ID | ID | | | |
| | NO: 1 | NO: 1 | NO: 2 | NO: 2 | | SCNIA | SEQ |
| Compound | Start | Stop | Start | Stop | | (% | ID |
| Number | Site | Site | Site | Site | Sequence (5′ to 3′) | UTC) | No. |
| 1262742 | 2872 | 2889 | N/A | N/A | AGGAACAGTTCCATGAGT | 38 | 276 |
| 1262748 | 2878 | 2895 | N/A | N/A | ATCTGGAGGAACAGTTCC | 48 | 277 |
| 1262754 | 2884 | 2901 | N/A | N/A | GTGTTAATCTGGAGGAAC | 69 | 278 |
| 1262760 | 2890 | 2907 | N/A | N/A | CCTGAAGTGTTAATCTGG | 37 | 279 |
| 1262766 | 2896 | 2913 | N/A | N/A | ATAACCCCTGAAGTGTTA | 63 | 280 |
| 1262772 | 2902 | 2919 | N/A | N/A | GCTTCCATAACCCCTGAA | 58 | 281 |
| 1262778 | 2908 | 2925 | N/A | N/A | CCTCCAGCTTCCATAACC | 68 | 282 |
| 1262784 | 2921 | 2938 | N/A | N/A | AAAAGCTCAGCTTCCTCC | 55 | 283 |
| 1262790 | 2928 | 2945 | N/A | N/A | ATGTAGTAAAAGCTCAGC | 75 | 284 |
| 1262796 | 2937 | 2954 | N/A | N/A | CCCCAAAAGATGTAGTAA | 76 | 285 |
| 1262802 | 78353 | 78370 | 471 | 488 | CTGCACATTTTAATTACC | 80 | 286 |
| 1262808 | 78362 | 78379 | 480 | 497 | CTTGTCATCCTGCACATT | 48 | 287 |
| 1262814 | 160821 | 160838 | 6592 | 6609 | TAAAGGAGTCCTGTTGAT | 56 | 288 |
| 1262820 | 160836 | 160853 | 6607 | 6624 | TTGGCATTGACCTCCTAA | 79 | 289 |
| 1262826 | 160842 | 160859 | 6613 | 6630 | GTCAGTTTGGCATTGACC | 54 | 290 |
| 1262832 | 160881 | 160898 | 6652 | 6669 | ATTGTAGGCACTGACCTT | 43 | 291 |
| 1262838 | 160887 | 160904 | 6658 | 6675 | TGTCTTATTGTAGGCACT | 69 | 292 |
| 1262844 | 160951 | 160968 | 6722 | 6739 | AGTAACCTCCTGTCAAGG | 70 | 293 |
| 1262850 | 160959 | 160976 | 6730 | 6747 | GTGAGAACAGTAACCTCC | 72 | 294 |
| 1262856 | 160971 | 160988 | 6742 | 6759 | TGTCAGCTGGTAGTGAGA | 71 | 295 |
| 1262862 | 160997 | 161014 | 6768 | 6785 | GCCATTGTGCATCTTATC | 40 | 296 |
| 1262868 | 161005 | 161022 | 6776 | 6793 | TCTGACTAGCCATTGTGC | 54 | 297 |
| 1262874 | 161011 | 161028 | 6782 | 6799 | CTACAGTCTGACTAGCCA | 72 | 298 |
| 1262880 | 161017 | 161034 | 6788 | 6805 | TGGTCCCTACAGTCTGAC | 66 | 299 |
| 1262886 | 161028 | 161045 | 6799 | 6816 | CCCCTTGAAACTGGTCCC | 52 | 300 |
| 1262892 | 161034 | 161051 | 6805 | 6822 | TTTGCACCCCTTGAAACT | 75 | 301 |
| 1262898 | 161040 | 161057 | 6811 | 6828 | CACAGGTTTGCACCCCTT | 57 | 302 |
| 1262904 | 161090 | 161107 | 6861 | 6878 | GTGGATACAATTACTACA | 42 | 303 |
| 1262910 | 161228 | 161245 | 6999 | 7016 | AGGTCCTTAGCCTATTTC | 44 | 304 |
| 1262916 | 161238 | 161255 | 7009 | 7026 | CCTGTTATAGAGGTCCTT | 41 | 305 |
| 1262922 | 161244 | 161261 | 7015 | 7032 | GGCATACCTGTTATAGAG | 86 | 306 |
| 1262928 | 161255 | 161272 | 7026 | 7043 | ACCCCCCAGGTGGCATAC | 56 | 307 |
| 1262934 | 161261 | 161278 | 7032 | 7049 | TGCCATACCCCCCAGGTG | 45 | 308 |
| 1262940 | 161267 | 161284 | 7038 | 7055 | TGTGGTTGCCATACCCCC | 66 | 309 |
| 1262946 | 161275 | 161292 | 7046 | 7063 | GAGGGCCATGTGGTTGCC | 55 | 310 |
| 1262952 | 161296 | 161313 | 7067 | 7084 | ACCACGACTTTGTGTAGC | 40 | 311 |
| 1262958 | 161302 | 161319 | 7073 | 7090 | ATGCAAACCACGACTTTG | 67 | 312 |
| 1262964 | 161308 | 161325 | 7079 | 7096 | GCCCTCATGCAAACCACG | 63 | 313 |
| 1262970 | 161316 | 161333 | 7087 | 7104 | TGCAGCATGCCCTCATGC | 46 | 314 |
| 1262976 | 161322 | 161339 | 7093 | 7110 | TCTAAGTGCAGCATGCCC | 83 | 315 |
| 1262982 | 161334 | 161351 | 7105 | 7122 | TCATGCATGATCTCTAAG | 63 | 316 |
| 1262988 | 161403 | 161420 | 7174 | 7191 | CTTATCACCCAATTACCC | 61 | 317 |
| 1262994 | 161409 | 161426 | 7180 | 7197 | CCTCCACTTATCACCCAA | 57 | 318 |
| 1263000 | 161435 | 161452 | 7206 | 7223 | TTTCGCAAAACAAGATCA | 48 | 319 |
| 1263006 | 161443 | 161460 | 7214 | 7231 | GGGCTGGATTTCGCAAAA | 87 | 320 |
| 1263012 | 161474 | 161491 | 7245 | 7262 | GGCCTACCCACAAATAAT | 66 | 321 |
| 1263018 | 161480 | 161497 | 7251 | 7268 | TTTACTGGCCTACCCACA | 44 | 322 |
| 1263024 | 161488 | 161505 | 7259 | 7276 | TGCTAAGATTTACTGGCC | 67 | 323 |
| 1263030 | 161498 | 161515 | 7269 | 7286 | AGTTTGCACCTGCTAAGA | 55 | 324 |
| 1263036 | 161504 | 161521 | 7275 | 7292 | GAATGAAGTTTGCACCTG | 77 | 325 |
| 1263042 | 161604 | 161621 | 7375 | 7392 | TCAGTCTTCTGGCGGTGG | 81 | 326 |
| 1263048 | 161659 | 161676 | 7430 | 7447 | GGCTAAACAAAGTGCAGG | 57 | 327 |
| 1263054 | 161670 | 161687 | 7441 | 7458 | GAGCCGAAGATGGCTAAA | 56 | 328 |
| 1263060 | 161677 | 161694 | 7448 | 7465 | TTGCTGAGAGCCGAAGAT | 66 | 329 |
| 1263066 | 161684 | 161701 | 7455 | 7472 | GTCAACCTTGCTGAGAGC | 59 | 330 |
| 1263072 | 161693 | 161710 | 7464 | 7481 | ATATACAGTGTCAACCTT | 77 | 331 |
| 1263078 | 161746 | 161763 | 7517 | 7534 | CGTGCACCACAGGGTAAA | 89 | 332 |
| 1263084 | 161782 | 161799 | 7553 | 7570 | AAATACTGTGCTTAGGTC | 50 | 333 |
| 1263090 | 161833 | 161850 | 7604 | 7621 | CCTGTGTAAAGCTTGCAC | 60 | 334 |
| 1263096 | 161876 | 161893 | 7647 | 7664 | AGCATCCAAACTATCTAT | 78 | 335 |
| 1263102 | 161883 | 161900 | 7654 | 7671 | CATTGATAGCATCCAAAC | 38 | 336 |
| 1263108 | 161907 | 161924 | 7678 | 7695 | CAGCAGCATGGTAATATA | 59 | 337 |
| 1263114 | 162026 | 162043 | 7797 | 7814 | GCTGCAAACTATTGCTTA | 49 | 338 |
| 1263120 | 162089 | 162106 | 7860 | 7877 | GTCTGGCTATATACCATA | 71 | 339 |
| 1263126 | 162095 | 162112 | 7866 | 7883 | TGTACAGTCTGGCTATAT | 64 | 340 |
| 1263132 | 162102 | 162119 | 7873 | 7890 | ACATGTCTGTACAGTCTG | 98 | 341 |
| 1263138 | 162244 | 162261 | 8015 | 8032 | GATATCAACCTGAAGATA | 52 | 342 |
| 1263144 | 162252 | 162269 | 8023 | 8040 | GTGATTGTGATATCAACC | 87 | 343 |
| 1263150 | 162478 | 162495 | 8249 | 8266 | GCAGGTACTACCAGAAAT | 91 | 344 |
| 1263156 | 162485 | 162502 | 8256 | 8273 | AGTTAGTGCAGGTACTAC | 47 | 345 |
| 1263162 | 162491 | 162508 | 8262 | 8279 | CAATTCAGTTAGTGCAGG | 43 | 346 |
| 1263168 | 162542 | 162559 | 8313 | 8330 | ACATAAACCGAAGTCAGA | 65 | 347 |
| 1263174 | 162596 | 162613 | 8367 | 8384 | AGCCCACATTCTATTTAG | 53 | 348 |
| 1263180 | 162643 | 162660 | 8414 | 8431 | GACTATATAAGTTGACTA | 35 | 349 |
| 1263186 | 162693 | 162710 | 8464 | 8481 | GGAGCCTATGGTTTGCTT | 67 | 350 |
| 1263192 | 162731 | 162748 | 8502 | 8519 | CACGAATACAGTTTATCT | 56 | 351 |
| 1263198 | 162738 | 162755 | 8509 | 8526 | TGCAGTTCACGAATACAG | 45 | 352 |
| 1263204 | 162744 | 162761 | 8515 | 8532 | CCAGCATGCAGTTCACGA | 61 | 353 |

TABLE 5
Effect of modified oligonucleotides on amount of human SCNIA RNA
in HepG2 cells

| | | SEQ | | | | | |
|---|---|---|---|---|---|---|---|
| | SEQ | ID | SEQ | SEQ | | | |
| | ID NO: | NO: 1 | ID NO: | ID NO: | | SCNIA | SEQ |
| Compound | 1 Start | Stop | 2 Start | 2 Stop | | (% | ID |
| Number | Site | Site | Site | Site | Sequence (5′ to 3′) | UTC) | No. |
| 1262743 | 2873 | 2890 | N/A | N/A | GAGGAACAGTTCCATGAG | 65 | 354 |
| 1262749 | 2879 | 2896 | N/A | N/A | AATCTGGAGGAACAGTTC | 58 | 355 |
| 1262755 | 2885 | 2902 | N/A | N/A | AGTGTTAATCTGGAGGAA | 47 | 356 |
| 1262761 | 2891 | 2908 | N/A | N/A | CCCTGAAGTGTTAATCTG | 68 | 357 |
| 1262767 | 2897 | 2914 | N/A | N/A | CATAACCCCTGAAGTGTT | 88 | 358 |
| 1262773 | 2903 | 2920 | N/A | N/A | AGCTTCCATAACCCCTGA | 36 | 359 |
| 1262779 | 2909 | 2926 | N/A | N/A | TCCTCCAGCTTCCATAAC | 52 | 360 |
| 1262785 | 2923 | 2940 | N/A | N/A | GTAAAAGCTCAGCTTCCT | 117 | 361 |
| 1262791 | 2929 | 2946 | N/A | N/A | GATGTAGTAAAAGCTCAG | 84 | 362 |
| 1262797 | 78337 | 78354 | 455 | 472 | CCATTTATTCTGCATATG | 111 | 363 |
| 1262803 | 78354 | 78371 | 472 | 489 | CCTGCACATTTTAATTAC | 84 | 364 |
| 1262809 | 160783 | 160800 | 6554 | 6571 | GGCTGTAAACAATTTGTC | 106 | 365 |
| 1262815 | 160822 | 160839 | 6593 | 6610 | CTAAAGGAGTCCTGTTGA | 122 | 366 |
| 1262821 | 160837 | 160854 | 6608 | 6625 | TTTGGCATTGACCTCCTA | 85 | 367 |
| 1262827 | 160843 | 160860 | 6614 | 6631 | AGTCAGTTTGGCATTGAC | 88 | 368 |
| 1262833 | 160882 | 160899 | 6653 | 6670 | TATTGTAGGCACTGACCT | 67 | 369 |
| 1262839 | 160888 | 160905 | 6659 | 6676 | CTGTCTTATTGTAGGCAC | 45 | 370 |
| 1262845 | 160952 | 160969 | 6723 | 6740 | CAGTAACCTCCTGTCAAG | 80 | 371 |
| 1262851 | 160960 | 160977 | 6731 | 6748 | AGTGAGAACAGTAACCTC | 47 | 372 |
| 1262857 | 160972 | 160989 | 6743 | 6760 | GTGTCAGCTGGTAGTGAG | 69 | 373 |
| 1262863 | 160998 | 161015 | 6769 | 6786 | AGCCATTGTGCATCTTAT | 127 | 374 |
| 1262869 | 161006 | 161023 | 6777 | 6794 | GTCTGACTAGCCATTGTG | 63 | 375 |
| 1262875 | 161012 | 161029 | 6783 | 6800 | CCTACAGTCTGACTAGCC | 104 | 376 |
| 1262881 | 161018 | 161035 | 6789 | 6806 | CTGGTCCCTACAGTCTGA | 97 | 377 |
| 1262887 | 161029 | 161046 | 6800 | 6817 | ACCCCTTGAAACTGGTCC | 72 | 378 |
| 1262893 | 161035 | 161052 | 6806 | 6823 | GTTTGCACCCCTTGAAAC | 63 | 379 |
| 1262899 | 161041 | 161058 | 6812 | 6829 | TCACAGGTTTGCACCCCT | 56 | 380 |
| 1262905 | 161091 | 161108 | 6862 | 6879 | AGTGGATACAATTACTAC | 67 | 381 |
| 1262911 | 161229 | 161246 | 7000 | 7017 | GAGGTCCTTAGCCTATTT | 78 | 382 |
| 1262917 | 161239 | 161256 | 7010 | 7027 | ACCTGTTATAGAGGTCCT | 69 | 383 |
| 1262923 | 161245 | 161262 | 7016 | 7033 | TGGCATACCTGTTATAGA | 75 | 384 |
| 1262929 | 161256 | 161273 | 7027 | 7044 | TACCCCCCAGGTGGCATA | 94 | 385 |
| 1262935 | 161262 | 161279 | 7033 | 7050 | TTGCCATACCCCCCAGGT | 105 | 386 |
| 1262941 | 161268 | 161285 | 7039 | 7056 | ATGTGGTTGCCATACCCC | 64 | 387 |
| 1262947 | 161289 | 161306 | 7060 | 7077 | CTTTGTGTAGCTGGGAGG | 61 | 388 |
| 1262953 | 161297 | 161314 | 7068 | 7085 | AACCACGACTTTGTGTAG | 79 | 389 |
| 1262959 | 161303 | 161320 | 7074 | 7091 | CATGCAAACCACGACTTT | 99 | 390 |
| 1262965 | 161310 | 161327 | 7081 | 7098 | ATGCCCTCATGCAAACCA | 61 | 391 |
| 1262971 | 161317 | 161334 | 7088 | 7105 | GTGCAGCATGCCCTCATG | 63 | 392 |
| 1262977 | 161323 | 161340 | 7094 | 7111 | CTCTAAGTGCAGCATGCC | 69 | 393 |
| 1262983 | 161335 | 161352 | 7106 | 7123 | CTCATGCATGATCTCTAA | 70 | 394 |
| 1262989 | 161404 | 161421 | 7175 | 7192 | ACTTATCACCCAATTACC | 70 | 395 |
| 1262995 | 161410 | 161427 | 7181 | 7198 | ACCTCCACTTATCACCCA | 63 | 396 |
| 1263001 | 161437 | 161454 | 7208 | 7225 | GATTTCGCAAAACAAGAT | 63 | 397 |
| 1263007 | 161459 | 161476 | 7230 | 7247 | AATCTACTTGGTCTAGGG | 87 | 398 |
| 1263013 | 161475 | 161492 | 7246 | 7263 | TGGCCTACCCACAAATAA | 58 | 399 |
| 1263019 | 161481 | 161498 | 7252 | 7269 | ATTTACTGGCCTACCCAC | 139 | 400 |
| 1263025 | 161493 | 161510 | 7264 | 7281 | GCACCTGCTAAGATTTAC | 84 | 401 |
| 1263031 | 161499 | 161516 | 7270 | 7287 | AAGTTTGCACCTGCTAAG | 82 | 402 |
| 1263037 | 161530 | 161547 | 7301 | 7318 | CATAACATTTATGACTCC | 78 | 403 |
| 1263043 | 161605 | 161622 | 7376 | 7393 | TTCAGTCTTCTGGCGGTG | 58 | 404 |
| 1263049 | 161662 | 161679 | 7433 | 7450 | GATGGCTAAACAAAGTGC | 67 | 405 |
| 1263055 | 161671 | 161688 | 7442 | 7459 | AGAGCCGAAGATGGCTAA | 68 | 406 |
| 1263061 | 161678 | 161695 | 7449 | 7466 | CTTGCTGAGAGCCGAAGA | 87 | 407 |
| 1263067 | 161687 | 161704 | 7458 | 7475 | AGTGTCAACCTTGCTGAG | 58 | 408 |
| 1263073 | 161694 | 161711 | 7465 | 7482 | CATATACAGTGTCAACCT | 73 | 409 |
| 1263079 | 161777 | 161794 | 7548 | 7565 | CTGTGCTTAGGTCATTAT | 76 | 410 |
| 1263085 | 161825 | 161842 | 7596 | 7613 | AAGCTTGCACTCTACATT | 78 | 411 |
| 1263091 | 161834 | 161851 | 7605 | 7622 | ACCTGTGTAAAGCTTGCA | 97 | 412 |
| 1263097 | 161877 | 161894 | 7648 | 7665 | TAGCATCCAAACTATCTA | 72 | 413 |
| 1263103 | 161884 | 161901 | 7655 | 7672 | GCATTGATAGCATCCAAA | 50 | 414 |
| 1263109 | 161911 | 161928 | 7682 | 7699 | GATACAGCAGCATGGTAA | 64 | 415 |
| 1263115 | 162028 | 162045 | 7799 | 7816 | GTGCTGCAAACTATTGCT | 68 | 416 |
| 1263121 | 162090 | 162107 | 7861 | 7878 | AGTCTGGCTATATACCAT | 100 | 417 |
| 1263127 | 162096 | 162113 | 7867 | 7884 | CTGTACAGTCTGGCTATA | 67 | 418 |
| 1263133 | 162103 | 162120 | 7874 | 7891 | AACATGTCTGTACAGTCT | 98 | 419 |
| 1263139 | 162246 | 162263 | 8017 | 8034 | GTGATATCAACCTGAAGA | 107 | 420 |
| 1263145 | 162253 | 162270 | 8024 | 8041 | AGTGATTGTGATATCAAC | 92 | 421 |
| 1263151 | 162480 | 162497 | 8251 | 8268 | GTGCAGGTACTACCAGAA | 67 | 422 |
| 1263157 | 162486 | 162503 | 8257 | 8274 | CAGTTAGTGCAGGTACTA | 88 | 423 |
| 1263163 | 162492 | 162509 | 8263 | 8280 | TCAATTCAGTTAGTGCAG | 42 | 424 |
| 1263169 | 162543 | 162560 | 8314 | 8331 | AACATAAACCGAAGTCAG | 60 | 425 |
| 1263175 | 162636 | 162653 | 8407 | 8424 | TAAGTTGACTACTCTGTT | 66 | 426 |
| 1263181 | 162645 | 162662 | 8416 | 8433 | TTGACTATATAAGTTGAC | 102 | 427 |
| 1263187 | 162694 | 162711 | 8465 | 8482 | AGGAGCCTATGGTTTGCT | 102 | 428 |
| 1263193 | 162732 | 162749 | 8503 | 8520 | TCACGAATACAGTTTATC | 74 | 429 |
| 1263199 | 162739 | 162756 | 8510 | 8527 | ATGCAGTTCACGAATACA | 44 | 430 |
| 1263205 | 162745 | 162762 | 8516 | 8533 | TCCAGCATGCAGTTCACG | 61 | 431 |

TABLE 6
Effect of modified oligonucleotides on amount of human SCNIA RNA
in HepG2 cells

| | | SEQ | | | | | |
|---|---|---|---|---|---|---|---|
| | SEQ | ID | SEQ | SEQ | | | |
| | ID NO: | NO: 1 | ID NO: | ID NO: | | SCNIA | SEQ |
| Compound | 1 Start | Stop | 2 Start | 2 Stop | | (% | ID |
| Number | Site | Site | Site | Site | Sequence (5′ to 3′) | UTC) | No. |
| 1262744 | 2874 | 2891 | N/A | N/A | GGAGGAACAGTTCCATGA | 33 | 432 |
| 1262750 | 2880 | 2897 | N/A | N/A | TAATCTGGAGGAACAGTT | 56 | 433 |
| 1262756 | 2886 | 2903 | N/A | N/A | AAGTGTTAATCTGGAGGA | 57 | 434 |
| 1262762 | 2892 | 2909 | N/A | N/A | CCCCTGAAGTGTTAATCT | 34 | 435 |
| 1262768 | 2898 | 2915 | N/A | N/A | CCATAACCCCTGAAGTGT | 57 | 436 |
| 1262774 | 2904 | 2921 | N/A | N/A | CAGCTTCCATAACCCCTG | 52 | 437 |
| 1262780 | 2910 | 2927 | N/A | N/A | TTCCTCCAGCTTCCATAA | 109 | 438 |
| 1262786 | 2924 | 2941 | N/A | N/A | AGTAAAAGCTCAGCTTCC | 53 | 439 |
| 1262792 | 2930 | 2947 | N/A | N/A | AGATGTAGTAAAAGCTCA | 57 | 440 |
| 1262798 | 78338 | 78355 | 456 | 473 | ACCATTTATTCTGCATAT | 43 | 441 |
| 1262804 | 78358 | 78375 | 476 | 493 | TCATCCTGCACATTTTAA | 77 | 442 |
| 1262810 | 160817 | 160834 | 6588 | 6605 | GGAGTCCTGTTGATAAAA | 111 | 443 |
| 1262816 | 160823 | 160840 | 6594 | 6611 | CCTAAAGGAGTCCTGTTG | 30 | 444 |
| 1262822 | 160838 | 160855 | 6609 | 6626 | GTTTGGCATTGACCTCCT | 62 | 445 |
| 1262828 | 160869 | 160886 | 6640 | 6657 | GACCTTAAGGAGATTTGT | 66 | 446 |
| 1262834 | 160883 | 160900 | 6654 | 6671 | TTATTGTAGGCACTGACC | 52 | 447 |
| 1262840 | 160889 | 160906 | 6660 | 6677 | ACTGTCTTATTGTAGGCA | 51 | 448 |
| 1262846 | 160953 | 160970 | 6724 | 6741 | ACAGTAACCTCCTGTCAA | 49 | 449 |
| 1262852 | 160961 | 160978 | 6732 | 6749 | TAGTGAGAACAGTAACCT | 97 | 450 |
| 1262858 | 160973 | 160990 | 6744 | 6761 | AGTGTCAGCTGGTAGTGA | 102 | 451 |
| 1262864 | 160999 | 161016 | 6770 | 6787 | TAGCCATTGTGCATCTTA | 79 | 452 |
| 1262870 | 161007 | 161024 | 6778 | 6795 | AGTCTGACTAGCCATTGT | 41 | 453 |
| 1262876 | 161013 | 161030 | 6784 | 6801 | CCCTACAGTCTGACTAGC | 170 | 454 |
| 1262882 | 161019 | 161036 | 6790 | 6807 | ACTGGTCCCTACAGTCTG | 40 | 455 |
| 1262888 | 161030 | 161047 | 6801 | 6818 | CACCCCTTGAAACTGGTC | 66 | 456 |
| 1262894 | 161036 | 161053 | 6807 | 6824 | GGTTTGCACCCCTTGAAA | 115 | 457 |
| 1262900 | 161043 | 161060 | 6814 | 6831 | AATCACAGGTTTGCACCC | 70 | 458 |
| 1262906 | 161146 | 161163 | 6917 | 6934 | AATCCACTAACAGATTCC | 123 | 459 |
| 1262912 | 161230 | 161247 | 7001 | 7018 | AGAGGTCCTTAGCCTATT | 44 | 460 |
| 1262918 | 161240 | 161257 | 7011 | 7028 | TACCTGTTATAGAGGTCC | 56 | 461 |
| 1262924 | 161246 | 161263 | 7017 | 7034 | GTGGCATACCTGTTATAG | 88 | 462 |
| 1262930 | 161257 | 161274 | 7028 | 7045 | ATACCCCCCAGGTGGCAT | 98 | 463 |
| 1262936 | 161263 | 161280 | 7034 | 7051 | GTTGCCATACCCCCCAGG | 54 | 464 |
| 1262942 | 161269 | 161286 | 7040 | 7057 | CATGTGGTTGCCATACCC | 45 | 465 |
| 1262948 | 161292 | 161309 | 7063 | 7080 | CGACTTTGTGTAGCTGGG | 35 | 466 |
| 1262954 | 161298 | 161315 | 7069 | 7086 | AAACCACGACTTTGTGTA | 93 | 467 |
| 1262960 | 161304 | 161321 | 7075 | 7092 | TCATGCAAACCACGACTT | 73 | 468 |
| 1262966 | 161312 | 161329 | 7083 | 7100 | GCATGCCCTCATGCAAAC | 43 | 469 |
| 1262972 | 161318 | 161335 | 7089 | 7106 | AGTGCAGCATGCCCTCAT | 76 | 470 |
| 1262978 | 161324 | 161341 | 7095 | 7112 | TCTCTAAGTGCAGCATGC | 110 | 471 |
| 1262984 | 161399 | 161416 | 7170 | 7187 | TCACCCAATTACCCCTCC | 66 | 472 |
| 1262990 | 161405 | 161422 | 7176 | 7193 | CACTTATCACCCAATTAC | 59 | 473 |
| 1262996 | 161411 | 161428 | 7182 | 7199 | CACCTCCACTTATCACCC | 69 | 474 |
| 1263002 | 161438 | 161455 | 7209 | 7226 | GGATTTCGCAAAACAAGA | 58 | 475 |
| 1263008 | 161460 | 161477 | 7231 | 7248 | TAATCTACTTGGTCTAGG | 42 | 476 |
| 1263014 | 161476 | 161493 | 7247 | 7264 | CTGGCCTACCCACAAATA | 104 | 477 |
| 1263020 | 161482 | 161499 | 7253 | 7270 | GATTTACTGGCCTACCCA | 35 | 478 |
| 1263026 | 161494 | 161511 | 7265 | 7282 | TGCACCTGCTAAGATTTA | 30 | 479 |
| 1263032 | 161500 | 161517 | 7271 | 7288 | GAAGTTTGCACCTGCTAA | 18 | 480 |
| 1263038 | 161599 | 161616 | 7370 | 7387 | CTTCTGGCGGTGGAGGGT | 97 | 481 |
| 1263044 | 161606 | 161623 | 7377 | 7394 | ATTCAGTCTTCTGGCGGT | 82 | 482 |
| 1263050 | 161666 | 161683 | 7437 | 7454 | CGAAGATGGCTAAACAAA | 66 | 483 |
| 1263056 | 161672 | 161689 | 7443 | 7460 | GAGAGCCGAAGATGGCTA | 58 | 484 |
| 1263062 | 161679 | 161696 | 7450 | 7467 | CCTTGCTGAGAGCCGAAG | 101 | 485 |
| 1263068 | 161689 | 161706 | 7460 | 7477 | ACAGTGTCAACCTTGCTG | 67 | 486 |
| 1263074 | 161695 | 161712 | 7466 | 7483 | ACATATACAGTGTCAACC | 76 | 487 |
| 1263080 | 161778 | 161795 | 7549 | 7566 | ACTGTGCTTAGGTCATTA | 75 | 488 |
| 1263086 | 161827 | 161844 | 7598 | 7615 | TAAAGCTTGCACTCTACA | 39 | 489 |
| 1263092 | 161835 | 161852 | 7606 | 7623 | TACCTGTGTAAAGCTTGC | 136 | 490 |
| 1263098 | 161878 | 161895 | 7649 | 7666 | ATAGCATCCAAACTATCT | 125 | 491 |
| 1263104 | 161885 | 161902 | 7656 | 7673 | TGCATTGATAGCATCCAA | 42 | 492 |
| 1263110 | 161912 | 161929 | 7683 | 7700 | AGATACAGCAGCATGGTA | 32 | 493 |
| 1263116 | 162029 | 162046 | 7800 | 7817 | AGTGCTGCAAACTATTGC | 67 | 494 |
| 1263122 | 162091 | 162108 | 7862 | 7879 | CAGTCTGGCTATATACCA | 55 | 495 |
| 1263128 | 162097 | 162114 | 7868 | 7885 | TCTGTACAGTCTGGCTAT | 128 | 496 |
| 1263134 | 162128 | 162145 | 7899 | 7916 | ATAGGTTAAGCAGTGTGT | 44 | 497 |
| 1263140 | 162247 | 162264 | 8018 | 8035 | TGTGATATCAACCTGAAG | 74 | 498 |
| 1263146 | 162336 | 162353 | 8107 | 8124 | ATCTACAACTACCCAGTC | 64 | 499 |
| 1263152 | 162481 | 162498 | 8252 | 8269 | AGTGCAGGTACTACCAGA | 76 | 500 |
| 1263158 | 162487 | 162504 | 8258 | 8275 | TCAGTTAGTGCAGGTACT | 60 | 501 |
| 1263164 | 162497 | 162514 | 8268 | 8285 | TACCTTCAATTCAGTTAG | 48 | 502 |
| 1263170 | 162572 | 162589 | 8343 | 8360 | CTAGAGCAGCATTACTCC | 42 | 503 |
| 1263176 | 162637 | 162654 | 8408 | 8425 | ATAAGTTGACTACTCTGT | 69 | 504 |
| 1263182 | 162655 | 162672 | 8426 | 8443 | CCTGATGTAATTGACTAT | 55 | 505 |
| 1263188 | 162695 | 162712 | 8466 | 8483 | GAGGAGCCTATGGTTTGC | 84 | 506 |
| 1263194 | 162734 | 162751 | 8505 | 8522 | GTTCACGAATACAGTTTA | 51 | 507 |
| 1263200 | 162740 | 162757 | 8511 | 8528 | CATGCAGTTCACGAATAC | 78 | 508 |
| 1263206 | 162767 | 162784 | 8538 | 8555 | ATTTAGCATAATAGTAGC | 78 | 509 |

### Example 2: Activity of Modified Oligonucleotides Targeting Human Scn1A in Hepg2 Cells, Single Dose, In Vitro

[0285] Modified oligonucleotides complementary to an SCN1A nucleic acid were synthesized and tested for their effect on SCN1A RNA levels in vitro. The modified oligonucleotides were tested in a series of experiments using the same culture conditions.

[0286] The modified oligonucleotides in the tables below are 18 nucleosides in length. Each nucleoside comprises a 2′-MOE sugar moiety. The internucleoside linkages throughout each modified oligonucleotide are phosphorothioate internucleoside linkages. All cytosine nucleobases throughout each modified oligonucleotide are 5-methylcytosines.

[0287] “Start site” indicates the 5′-most nucleoside of the target sequence to which the modified oligonucleotide is complementary. “Stop site” indicates the 3′-most nucleoside of the target sequence to which the modified oligonucleotide is complementary. As shown in the tables below, the modified oligonucleotides are complementary to either the human SCN1A genomic sequence, designated herein as SEQ ID NO: 1 (described herein above) or to the human SCN1A mRNA, designated herein as SEQ ID NO: 2 (described herein above) or to both. ‘N/A’ indicates that the modified oligonucleotide is not complementary to that particular target sequence with 100% complementarity.

[0288] Cultured HepG2 cells at a density of 20,000 cells per well were transfected using electroporation with 15,000 nM of modified oligonucleotide. After a treatment period of approximately 24 hours, RNA was isolated from the cells and SCN1A RNA levels were measured by quantitative real-time RTPCR. Human primer probe set RTS48189 (forward sequence CTATACCTCGACCAGGAAACAAA, designated herein as SEQ ID NO: 18; reverse sequence TGACCATGTTAAGACAGATGAGAA, designated herein as SEQ ID NO: 19; probe sequence TGTCTGGTTACGAAGTCAAAGACCATTCC, designated herein as SEQ ID NO: 20) was used to measure full-length SCN1A RNA levels. SCN1A RNA levels were normalized to total RNA content, as measured by RIBOGREEN®. SCN1A RNA is presented as % of the average of untreated control (% UTC). As shown in the tables below, certain modified oligonucleotides complementary to SCN1A RNA increased the amount of human SCN1A RNA compared to untreated control. Each of Tables 7-11 represents a different experiment.

TABLE 7
Effect of modified oligonucleotides on amount of human SCNIA RNA
in HepG2 cells

| | SEQ | SEQ | SEQ | SEQ | | | |
|---|---|---|---|---|---|---|---|
| | ID NO: | ID NO: | ID NO: | ID NO: | | SCN1A | SEQ |
| Compound | 1 Start | 1 Stop | 2 Start | 2 Stop | | (% | ID |
| Number | Site | Site | Site | Site | Sequence (5′ to 3′) | UTC) | No. |
| 1342105 | 144706 | 144723 | N/A | N/A | TTGGAGCAAGATTATCCT | 111 | 510 |
| 1342107 | 144766 | 144783 | N/A | N/A | GTAATACAGTACCCATAA | 61 | 511 |
| 1342109 | 144753 | 144770 | N/A | N/A | CATAATAAAGGGCTCAGG | 112 | 512 |
| 1342118 | 144686 | 144703 | N/A | N/A | ACAAAATAGAAATATATA | 173 | 513 |
| 1366952 | 95466 | 95483 | N/A | N/A | AACACACAAAAGAAAATC | 136 | 514 |
| 1366958 | 144722 | 144739 | N/A | N/A | CTCCACCCCATCCAAGTT | 114 | 515 |
| 1366964 | 152881 | 152898 | N/A | N/A | GAGCCTGAAAGAGGCTGA | 59 | 516 |
| 1366966 | 91106 | 91123 | N/A | N/A | GAAAAAGAAATATTAGGG | 89 | 517 |
| 1366970 | 91360 | 91377 | N/A | N/A | AAAGTGGGCACATCACCT | 57 | 518 |
| 1366971 | 144762 | 144779 | N/A | N/A | TACAGTACCCATAATAAA | 91 | 519 |
| 1366976 | 152950 | 152967 | N/A | N/A | AAAATACTACATCTTACA | 57 | 520 |
| 1366978 | 91136 | 91153 | N/A | N/A | TGATGAGAGCAAAACTCC | 76 | 521 |
| 1366981 | 110791 | 110808 | N/A | N/A | TTTGAAGACTAAACACAT | 82 | 522 |
| 1366982 | 144710 | 144727 | N/A | N/A | CAAGTTGGAGCAAGATTA | 138 | 523 |
| 1366983 | 110807 | 110824 | N/A | N/A | TTTTTCAAGCAGAAAATT | 66 | 524 |
| 1366988 | 152876 | 152893 | N/A | N/A | TGAAAGAGGCTGAAATCA | 73 | 525 |
| 1366991 | 152924 | 152941 | N/A | N/A | AAGAGCAAAGTTGGAATG | 118 | 526 |
| 1367000 | 110787 | 110804 | N/A | N/A | AAGACTAAACACATTTAC | 83 | 527 |
| 1367003 | 95470 | 95487 | N/A | N/A | AAGGAACACACAAAAGAA | 54 | 528 |
| 1367004 | 144682 | 144699 | N/A | N/A | AATAGAAATATATAGTTT | 85 | 529 |
| 1367005 | 95434 | 95451 | N/A | N/A | ATATTACAAAAAGCTAAC | 55 | 530 |
| 1367011 | 110827 | 110844 | N/A | N/A | ACACAATTAAATGTAAAC | 167 | 531 |
| 1367016 | 110823 | 110840 | N/A | N/A | AATTAAATGTAAACAGTT | 85 | 532 |
| 1367021 | 95450 | 95467 | N/A | N/A | TCAAAATCCAAGTGTTAT | 67 | 533 |
| 1367022 | 152955 | 152972 | N/A | N/A | GATAGAAAATACTACATC | 83 | 534 |
| 1367024 | 152941 | 152958 | N/A | N/A | CATCTTACAAAGTTTTGA | 53 | 535 |
| 1367035 | 152937 | 152954 | N/A | N/A | TTACAAAGTTTTGAAGAG | 66 | 536 |
| 1367038 | 152911 | 152928 | N/A | N/A | GAATGAGCATGAATTTCA | 68 | 537 |
| 1367045 | 95458 | 95475 | N/A | N/A | AAAGAAAATCAAAATCCA | 108 | 538 |
| 1367047 | 144758 | 144775 | N/A | N/A | GTACCCATAATAAAGGGC | 61 | 539 |
| 1367048 | 152885 | 152902 | N/A | N/A | CTTGGAGCCTGAAAGAGG | 74 | 540 |
| 1367049 | 110799 | 110816 | N/A | N/A | GCAGAAAATTTGAAGACT | 83 | 541 |
| 1367053 | 110819 | 110836 | N/A | N/A | AAATGTAAACAGTTTTTC | 89 | 542 |
| 1367066 | 152907 | 152924 | N/A | N/A | GAGCATGAATTTCAGTTT | 78 | 543 |
| 1367068 | 152959 | 152976 | N/A | N/A | GGTTGATAGAAAATACTA | 88 | 544 |
| 1367073 | 95454 | 95471 | N/A | N/A | AAAATCAAAATCCAAGTG | 113 | 545 |
| 1367084 | 144698 | 144715 | N/A | N/A | AGATTATCCTATACAAAA | 71 | 546 |
| 1367088 | 95446 | 95463 | N/A | N/A | AATCCAAGTGTTATATTA | 80 | 547 |
| 1367090 | 95462 | 95479 | N/A | N/A | CACAAAAGAAAATCAAAA | 69 | 548 |
| 1367097 | 95422 | 95439 | N/A | N/A | GCTAACATTGAAAAGCCC | 55 | 549 |
| 1367098 | 144714 | 144731 | N/A | N/A | CATCCAAGTTGGAGCAAG | 147 | 550 |
| 1367102 | 152895 | 152912 | N/A | N/A | CAGTTTAGGTCTTGGAGC | 76 | 551 |
| 1367103 | 110795 | 110812 | N/A | N/A | AAAATTTGAAGACTAAAC | 44 | 552 |
| 1367108 | 152903 | 152920 | N/A | N/A | ATGAATTTCAGTTTAGGT | 77 | 553 |
| 1367109 | 152899 | 152916 | N/A | N/A | ATTTCAGTTTAGGTCTTG | 69 | 554 |
| 1367113 | 152946 | 152963 | N/A | N/A | TACTACATCTTACAAAGT | 106 | 555 |
| 1367116 | 95438 | 95455 | N/A | N/A | TGTTATATTACAAAAAGC | 77 | 556 |
| 1367123 | 110803 | 110820 | N/A | N/A | TCAAGCAGAAAATTTGAA | 95 | 557 |
| 1367124 | 152928 | 152945 | N/A | N/A | TTTGAAGAGCAAAGTTGG | 75 | 558 |
| 1367127 | 91140 | 91157 | N/A | N/A | TGGGTGATGAGAGCAAAA | 111 | 559 |
| 1367140 | 110771 | 110788 | N/A | N/A | ACCTTCCAATATGCTTAC | 77 | 560 |
| 1367141 | 144690 | 144707 | N/A | N/A | CTATACAAAATAGAAATA | 94 | 561 |
| 1367145 | 91144 | 91161 | N/A | N/A | AGCCTGGGTGATGAGAGC | 69 | 562 |
| 1367146 | 152932 | 152949 | N/A | N/A | AAGTTTTGAAGAGCAAAG | 75 | 563 |
| 1367147 | 95478 | 95495 | N/A | N/A | TTATTGTTAAGGAACACA | 121 | 564 |
| 1367150 | 144694 | 144711 | N/A | N/A | TATCCTATACAAAATAGA | 57 | 565 |
| 1367151 | 110775 | 110792 | N/A | N/A | ATTTACCTTCCAATATGC | 77 | 566 |
| 1367153 | 152867 | 152884 | N/A | N/A | CTGAAATCAAATAAAATA | 104 | 567 |
| 1367162 | 95426 | 95443 | N/A | N/A | AAAAGCTAACATTGAAAA | 63 | 568 |
| 1367163 | 144702 | 144719 | N/A | N/A | AGCAAGATTATCCTATAC | 139 | 569 |
| 1367165 | 110783 | 110800 | N/A | N/A | CTAAACACATTTACCTTC | 117 | 570 |
| 1367166 | 110811 | 110828 | N/A | N/A | ACAGTTTTTCAAGCAGAA | 118 | 571 |
| 1367171 | 91216 | 91233 | N/A | N/A | AGGAGAACAGGAGAATCG | 83 | 572 |
| 1367185 | 95442 | 95459 | N/A | N/A | CAAGTGTTATATTACAAA | 85 | 573 |
| 1367187 | 95474 | 95491 | N/A | N/A | TGTTAAGGAACACACAAA | 50 | 574 |
| 1367189 | 144718 | 144735 | N/A | N/A | ACCCCATCCAAGTTGGAG | 82 | 575 |
| 1367192 | 152872 | 152889 | N/A | N/A | AGAGGCTGAAATCAAATA | 90 | 576 |
| 1367193 | 152919 | 152936 | N/A | N/A | CAAAGTTGGAATGAGCAT | 84 | 577 |
| 1367195 | 91220 | 91237 | N/A | N/A | AGGCAGGAGAACAGGAGA | 83 | 578 |
| 1367196 | 152890 | 152907 | N/A | N/A | TAGGTCTTGGAGCCTGAA | 69 | 579 |
| 1367200 | 152915 | 152932 | N/A | N/A | GTTGGAATGAGCATGAAT | 88 | 580 |
| 1367203 | 110815 | 110832 | N/A | N/A | GTAAACAGTTTTTCAAGC | 63 | 581 |
| 1367205 | 144678 | 144695 | N/A | N/A | GAAATATATAGTTTGTTA | 63 | 582 |
| 1367215 | 152856 | 152873 | N/A | N/A | TAAAATAGGTTTATATTT | 71 | 583 |
| 1367229 | 110779 | 110796 | N/A | N/A | ACACATTTACCTTCCAAT | 72 | 584 |
| 1367231 | 95430 | 95447 | N/A | N/A | TACAAAAAGCTAACATTG | 121 | 585 |
| 1367240 | 152861 | 152878 | N/A | N/A | TCAAATAAAATAGGTTTA | 123 | 586 |

TABLE 8
Effect of modified oligonucleotides on amount of human SCNIA
RNA in HepG2 cells

| | SEQ | SEQ | SEQ | SEQ | | | |
|---|---|---|---|---|---|---|---|
| | ID NO: | ID NO: | ID NO: | ID NO: | | SCNIA | SEQ |
| Compound | 1 Start | 1 Stop | 2 Start | 2 Stop | | (% | ID |
| Number | Site | Site | Site | Site | Sequence (5′ to 3′) | UTC) | No. |
| 1342110 | 144711 | 144728 | N/A | N/A | CCAAGTTGGAGCAAGATT | 67 | 587 |
| 1342115 | 144691 | 144708 | N/A | N/A | CCTATACAAAATAGAAAT | 25 | 588 |
| 1366953 | 95479 | 95496 | N/A | N/A | GTTATTGTTAAGGAACAC | 40 | 589 |
| 1366954 | 144703 | 144720 | N/A | N/A | GAGCAAGATTATCCTATA | 72 | 590 |
| 1366957 | 95447 | 95464 | N/A | N/A | AAATCCAAGTGTTATATT | 117 | 591 |
| 1366959 | 144699 | 144716 | N/A | N/A | AAGATTATCCTATACAAA | 54 | 592 |
| 1366967 | 91137 | 91154 | N/A | N/A | GTGATGAGAGCAAAACTC | 50 | 593 |
| 1366973 | 95455 | 95472 | N/A | N/A | GAAAATCAAAATCCAAGT | 43 | 594 |
| 1366974 | 152929 | 152946 | N/A | N/A | TTTTGAAGAGCAAAGTTG | 81 | 595 |
| 1366977 | 110828 | 110845 | N/A | N/A | TACACAATTAAATGTAAA | 213 | 596 |
| 1366980 | 152908 | 152925 | N/A | N/A | TGAGCATGAATTTCAGTT | 152 | 597 |
| 1366984 | 152904 | 152921 | N/A | N/A | CATGAATTTCAGTTTAGG | 124 | 598 |
| 1366990 | 95435 | 95452 | N/A | N/A | TATATTACAAAAAGCTAA | 62 | 599 |
| 1366992 | 110788 | 110805 | N/A | N/A | GAAGACTAAACACATTTA | 57 | 600 |
| 1366995 | 152878 | 152895 | N/A | N/A | CCTGAAAGAGGCTGAAAT | 66 | 601 |
| 1366999 | 91213 | 91230 | N/A | N/A | AGAACAGGAGAATCGCTT | 60 | 602 |
| 1367002 | 91217 | 91234 | N/A | N/A | CAGGAGAACAGGAGAATC | 44 | 603 |
| 1367014 | 152938 | 152955 | N/A | N/A | CTTACAAAGTTTTGAAGA | 155 | 604 |
| 1367015 | 152868 | 152885 | N/A | N/A | GCTGAAATCAAATAAAAT | 51 | 605 |
| 1367017 | 95443 | 95460 | N/A | N/A | CCAAGTGTTATATTACAA | 25 | 606 |
| 1367020 | 152896 | 152913 | N/A | N/A | TCAGTTTAGGTCTTGGAG | 109 | 607 |
| 1367023 | 110804 | 110821 | N/A | N/A | TTCAAGCAGAAAATTTGA | 62 | 608 |
| 1367031 | 152934 | 152951 | N/A | N/A | CAAAGTTTTGAAGAGCAA | 25 | 609 |
| 1367034 | 95451 | 95468 | N/A | N/A | ATCAAAATCCAAGTGTTA | 52 | 610 |
| 1367036 | 152947 | 152964 | N/A | N/A | ATACTACATCTTACAAAG | 85 | 611 |
| 1367050 | 95475 | 95492 | N/A | N/A | TTGTTAAGGAACACACAA | 24 | 612 |
| 1367054 | 91361 | 91378 | N/A | N/A | CAAAGTGGGCACATCACC | 69 | 613 |
| 1367056 | 152956 | 152973 | N/A | N/A | TGATAGAAAATACTACAT | 69 | 614 |
| 1367057 | 95463 | 95480 | N/A | N/A | ACACAAAAGAAAATCAAA | 63 | 615 |
| 1367058 | 152951 | 152968 | N/A | N/A | GAAAATACTACATCTTAC | 73 | 616 |
| 1367059 | 152920 | 152937 | N/A | N/A | GCAAAGTTGGAATGAGCA | 107 | 617 |
| 1367060 | 95459 | 95476 | N/A | N/A | AAAAGAAAATCAAAATCC | 44 | 618 |
| 1367061 | 144679 | 144696 | N/A | N/A | AGAAATATATAGTTTGTT | 56 | 619 |
| 1367069 | 152891 | 152908 | N/A | N/A | TTAGGTCTTGGAGCCTGA | 61 | 620 |
| 1367075 | 152882 | 152899 | N/A | N/A | GGAGCCTGAAAGAGGCTG | 62 | 621 |
| 1367078 | 144687 | 144704 | N/A | N/A | TACAAAATAGAAATATAT | 34 | 622 |
| 1367081 | 95471 | 95488 | N/A | N/A | TAAGGAACACACAAAAGA | 54 | 623 |
| 1367099 | 152887 | 152904 | N/A | N/A | GTCTTGGAGCCTGAAAGA | 96 | 624 |
| 1367107 | 144695 | 144712 | N/A | N/A | TTATCCTATACAAAATAG | 101 | 625 |
| 1367114 | 110792 | 110809 | N/A | N/A | ATTTGAAGACTAAACACA | 28 | 626 |
| 1367117 | 110780 | 110797 | N/A | N/A | AACACATTTACCTTCCAA | 45 | 627 |
| 1367121 | 144719 | 144736 | N/A | N/A | CACCCCATCCAAGTTGGA | 188 | 628 |
| 1367122 | 152925 | 152942 | N/A | N/A | GAAGAGCAAAGTTGGAAT | 56 | 629 |
| 1367125 | 91107 | 91124 | N/A | N/A | AGAAAAAGAAATATTAGG | 78 | 630 |
| 1367128 | 95427 | 95444 | N/A | N/A | AAAAAGCTAACATTGAAA | 65 | 631 |
| 1367129 | 110820 | 110837 | N/A | N/A | TAAATGTAAACAGTTTTT | 55 | 632 |
| 1367133 | 152858 | 152875 | N/A | N/A | AATAAAATAGGTTTATAT | 42 | 633 |
| 1367135 | 144759 | 144776 | N/A | N/A | AGTACCCATAATAAAGGG | 102 | 634 |
| 1367137 | 110816 | 110833 | N/A | N/A | TGTAAACAGTTTTTCAAG | 22 | 635 |
| 1367152 | 95423 | 95440 | N/A | N/A | AGCTAACATTGAAAAGCC | 46 | 636 |
| 1367155 | 144723 | 144740 | N/A | N/A | GCTCCACCCCATCCAAGT | 161 | 637 |
| 1367157 | 110784 | 110801 | N/A | N/A | ACTAAACACATTTACCTT | 82 | 638 |
| 1367161 | 152916 | 152933 | N/A | N/A | AGTTGGAATGAGCATGAA | 59 | 639 |
| 1367164 | 152900 | 152917 | N/A | N/A | AATTTCAGTTTAGGTCTT | 76 | 640 |
| 1367172 | 152912 | 152929 | N/A | N/A | GGAATGAGCATGAATITC | 73 | 641 |
| 1367174 | 144763 | 144780 | N/A | N/A | ATACAGTACCCATAATAA | 48 | 642 |
| 1367177 | 110776 | 110793 | N/A | N/A | CATTTACCTTCCAATATG | 28 | 643 |
| 1367179 | 95431 | 95448 | N/A | N/A | TTACAAAAAGCTAACATT | 69 | 644 |
| 1367182 | 144715 | 144732 | N/A | N/A | CCATCCAAGTTGGAGCAA | 129 | 645 |
| 1367184 | 144767 | 144784 | N/A | N/A | GGTAATACAGTACCCATA | 125 | 646 |
| 1367188 | 95439 | 95456 | N/A | N/A | GTGTTATATTACAAAAAG | 82 | 647 |
| 1367191 | 110772 | 110789 | N/A | N/A | TACCTTCCAATATGCTTA | 9 | 648 |
| 1367197 | 110796 | 110813 | N/A | N/A | GAAAATTTGAAGACTAAA | 38 | 649 |
| 1367208 | 152960 | 152977 | N/A | N/A | AGGTTGATAGAAAATACT | 36 | 650 |
| 1367210 | 144754 | 144771 | N/A | N/A | CCATAATAAAGGGCTCAG | 31 | 651 |
| 1367212 | 152873 | 152890 | N/A | N/A | AAGAGGCTGAAATCAAAT | 66 | 652 |
| 1367214 | 110824 | 110841 | N/A | N/A | CAATTAAATGTAAACAGT | 165 | 653 |
| 1367216 | 91141 | 91158 | N/A | N/A | CTGGGTGATGAGAGCAAA | 100 | 654 |
| 1367218 | 144707 | 144724 | N/A | N/A | GTTGGAGCAAGATTATCC | 112 | 655 |
| 1367221 | 144683 | 144700 | N/A | N/A | AAATAGAAATATATAGTT | 76 | 656 |
| 1367222 | 91221 | 91238 | N/A | N/A | GAGGCAGGAGAACAGGAG | 51 | 657 |
| 1367223 | 152862 | 152879 | N/A | N/A | ATCAAATAAAATAGGTTT | 70 | 658 |
| 1367228 | 110812 | 110829 | N/A | N/A | AACAGTTTTTCAAGCAGA | 72 | 659 |
| 1367232 | 95467 | 95484 | N/A | N/A | GAACACACAAAAGAAAAT | 141 | 660 |
| 1367233 | 110800 | 110817 | N/A | N/A | AGCAGAAAATTTGAAGAC | 52 | 661 |
| 1367236 | 110808 | 110825 | N/A | N/A | GTTTTTCAAGCAGAAAAT | 239 | 662 |
| 1367243 | 152942 | 152959 | N/A | N/A | ACATCTTACAAAGTTTTG | 41 | 663 |

TABLE 9
Effect of modified oligonucleotides on amount of human SCNIA RNA
in HepG2 cells

| | SEQ | SEQ | SEQ | SEQ | | | |
|---|---|---|---|---|---|---|---|
| | ID NO: | ID NO: | ID NO: | ID NO: | | SCN1A | SEQ |
| Compound | 1 Start | 1 Stop | 2 Start | 2 Stop | | (% | ID |
| Number | Site | Site | Site | Site | Sequence (5′ to 3′) | UTC) | No. |
| 1342108 | 144716 | 144733 | N/A | N/A | CCCATCCAAGTTGGAGCA | 97 | 664 |
| 1342111 | 144768 | 144785 | N/A | N/A | GGGTAATACAGTACCCAT | 50 | 665 |
| 1342122 | 144696 | 144713 | N/A | N/A | ATTATCCTATACAAAATA | 60 | 666 |
| 1366955 | 95456 | 95473 | N/A | N/A | AGAAAATCAAAATCCAAG | 41 | 667 |
| 1366961 | 152888 | 152905 | N/A | N/A | GGTCTTGGAGCCTGAAAG | 136 | 668 |
| 1366962 | 95468 | 95485 | N/A | N/A | GGAACACACAAAAGAAAA | 117 | 669 |
| 1366963 | 152952 | 152969 | N/A | N/A | AGAAAATACTACATCTTA | 55 | 670 |
| 1366965 | 152926 | 152943 | N/A | N/A | TGAAGAGCAAAGTTGGAA | 79 | 671 |
| 1366968 | 152865 | 152882 | N/A | N/A | GAAATCAAATAAAATAGG | 54 | 672 |
| 1366969 | 95452 | 95469 | N/A | N/A | AATCAAAATCCAAGTGTT | 54 | 673 |
| 1366972 | 95460 | 95477 | N/A | N/A | CAAAAGAAAATCAAAATC | 66 | 674 |
| 1366975 | 110829 | 110846 | N/A | N/A | ATACACAATTAAATGTAA | 60 | 675 |
| 1366985 | 95440 | 95457 | N/A | N/A | AGTGTTATATTACAAAAA | 52 | 676 |
| 1366996 | 152909 | 152926 | N/A | N/A | ATGAGCATGAATTTCAGT | 67 | 677 |
| 1366997 | 152917 | 152934 | N/A | N/A | AAGTTGGAATGAGCATGA | 71 | 678 |
| 1367001 | 95424 | 95441 | N/A | N/A | AAGCTAACATTGAAAAGC | 93 | 679 |
| 1367007 | 152905 | 152922 | N/A | N/A | GCATGAATTTCAGTTTAG | 68 | 680 |
| 1367008 | 152944 | 152961 | N/A | N/A | CTACATCTTACAAAGTTT | 104 | 681 |
| 1367018 | 152897 | 152914 | N/A | N/A | TTCAGTTTAGGTCTTGGA | 87 | 682 |
| 1367025 | 91218 | 91235 | N/A | N/A | GCAGGAGAACAGGAGAAT | 59 | 683 |
| 1367026 | 152874 | 152891 | N/A | N/A | AAAGAGGCTGAAATCAAA | 68 | 684 |
| 1367029 | 95420 | 95437 | N/A | N/A | TAACATTGAAAAGCCCAA | 78 | 685 |
| 1367032 | 91142 | 91159 | N/A | N/A | CCTGGGTGATGAGAGCAA | 98 | 686 |
| 1367033 | 144688 | 144705 | N/A | N/A | ATACAAAATAGAAATATA | 77 | 687 |
| 1367037 | 152901 | 152918 | N/A | N/A | GAATTTCAGTTTAGGTCT | 95 | 688 |
| 1367039 | 144755 | 144772 | N/A | N/A | CCCATAATAAAGGGCTCA | 66 | 689 |
| 1367040 | 152961 | 152978 | N/A | N/A | AAGGTTGATAGAAAATAC | 133 | 690 |
| 1367042 | 91222 | 91239 | N/A | N/A | TGAGGCAGGAGAACAGGA | 57 | 691 |
| 1367043 | 144712 | 144729 | N/A | N/A | TCCAAGTTGGAGCAAGAT | 67 | 692 |
| 1367044 | 144700 | 144717 | N/A | N/A | CAAGATTATCCTATACAA | 57 | 693 |
| 1367071 | 144760 | 144777 | N/A | N/A | CAGTACCCATAATAAAGG | 49 | 694 |
| 1367072 | 152869 | 152886 | N/A | N/A | GGCTGAAATCAAATAAAA | 84 | 695 |
| 1367076 | 144704 | 144721 | N/A | N/A | GGAGCAAGATTATCCTAT | 113 | 696 |
| 1367079 | 95428 | 95445 | N/A | N/A | CAAAAAGCTAACATTGAA | 38 | 697 |
| 1367080 | 110789 | 110806 | N/A | N/A | TGAAGACTAAACACATTT | 29 | 698 |
| 1367082 | 152957 | 152974 | N/A | N/A | TTGATAGAAAATACTACA | 89 | 699 |
| 1367083 | 152883 | 152900 | N/A | N/A | TGGAGCCTGAAAGAGGCT | 81 | 700 |
| 1367085 | 110793 | 110810 | N/A | N/A | AATTTGAAGACTAAACAC | 46 | 701 |
| 1367087 | 152930 | 152947 | N/A | N/A | GTTTTGAAGAGCAAAGTT | 85 | 702 |
| 1367089 | 144684 | 144701 | N/A | N/A | AAAATAGAAATATATAGT | 70 | 703 |
| 1367091 | 152892 | 152909 | N/A | N/A | TTTAGGTCTTGGAGCCTG | 34 | 704 |
| 1367093 | 95432 | 95449 | N/A | N/A | ATTACAAAAAGCTAACAT | 57 | 705 |
| 1367096 | 110813 | 110830 | N/A | N/A | AAACAGTTTTTCAAGCAG | 59 | 706 |
| 1367100 | 110773 | 110790 | N/A | N/A | TTACCTTCCAATATGCTT | 24 | 707 |
| 1367101 | 110801 | 110818 | N/A | N/A | AAGCAGAAAATTTGAAGA | 102 | 708 |
| 1367104 | 110825 | 110842 | N/A | N/A | ACAATTAAATGTAAACAG | 58 | 709 |
| 1367105 | 110805 | 110822 | N/A | N/A | TTTCAAGCAGAAAATTTG | 78 | 710 |
| 1367110 | 95480 | 95497 | N/A | N/A | GGTTATTGTTAAGGAACA | 61 | 711 |
| 1367115 | 95444 | 95461 | N/A | N/A | TCCAAGTGTTATATTACA | 72 | 712 |
| 1367119 | 95436 | 95453 | N/A | N/A | TTATATTACAAAAAGCTA | 99 | 713 |
| 1367120 | 110777 | 110794 | N/A | N/A | ACATTTACCTTCCAATAT | 79 | 714 |
| 1367126 | 95472 | 95489 | N/A | N/A | TTAAGGAACACACAAAAG | 39 | 715 |
| 1367131 | 144724 | 144741 | N/A | N/A | CGCTCCACCCCATCCAAG | 167 | 716 |
| 1367132 | 95464 | 95481 | N/A | N/A | CACACAAAAGAAAATCAA | 155 | 717 |
| 1367136 | 152913 | 152930 | N/A | N/A | TGGAATGAGCATGAATTT | 55 | 718 |
| 1367138 | 152939 | 152956 | N/A | N/A | TCTTACAAAGTTTTGAAG | 36 | 719 |
| 1367139 | 152948 | 152965 | N/A | N/A | AATACTACATCTTACAAA | 66 | 720 |
| 1367143 | 152921 | 152938 | N/A | N/A | AGCAAAGTTGGAATGAGC | 97 | 721 |
| 1367144 | 144720 | 144737 | N/A | N/A | CCACCCCATCCAAGTTGG | 45 | 722 |
| 1367167 | 110781 | 110798 | N/A | N/A | AAACACATTTACCTTCCA | 46 | 723 |
| 1367169 | 110821 | 110838 | N/A | N/A | TTAAATGTAAACAGTTTT | 61 | 724 |
| 1367173 | 91138 | 91155 | N/A | N/A | GGTGATGAGAGCAAAACT | 64 | 725 |
| 1367175 | 91108 | 91125 | N/A | N/A | AAGAAAAAGAAATATTAG | 32 | 726 |
| 1367176 | 110797 | 110814 | N/A | N/A | AGAAAATTTGAAGACTAA | 36 | 727 |
| 1367180 | 95476 | 95493 | N/A | N/A | ATTGTTAAGGAACACACA | 101 | 728 |
| 1367194 | 152879 | 152896 | N/A | N/A | GCCTGAAAGAGGCTGAAA | 58 | 729 |
| 1367198 | 91214 | 91231 | N/A | N/A | GAGAACAGGAGAATCGCT | 45 | 730 |
| 1367204 | 144692 | 144709 | N/A | N/A | TCCTATACAAAATAGAAA | 72 | 731 |
| 1367206 | 110817 | 110834 | N/A | N/A | ATGTAAACAGTTTTTCAA | 18 | 732 |
| 1367207 | 95448 | 95465 | N/A | N/A | AAAATCCAAGTGTTATAT | 107 | 733 |
| 1367209 | 110785 | 110802 | N/A | N/A | GACTAAACACATTTACCT | 97 | 734 |
| 1367211 | 144680 | 144697 | N/A | N/A | TAGAAATATATAGTTTGT | 157 | 735 |
| 1367219 | 144764 | 144781 | N/A | N/A | AATACAGTACCCATAATA | 49 | 736 |
| 1367220 | 110809 | 110826 | N/A | N/A | AGTTTTTCAAGCAGAAAA | 108 | 737 |
| 1367225 | 152935 | 152952 | N/A | N/A | ACAAAGTTTTGAAGAGCA | 82 | 738 |
| 1367227 | 152859 | 152876 | N/A | N/A | AAATAAAATAGGTTTATA | 92 | 739 |

TABLE 10
Effect of modified oligonucleotides on amount of human SCNIA RNA
in HepG2 cells

| | SEQ | SEQ | SEQ | SEQ | | | |
|---|---|---|---|---|---|---|---|
| | ID NO: | ID NO: | ID NO: | ID NO: | | SCNIA | SEQ |
| Compound | 1 Start | 1 Stop | 2 Start | 2 Stop | | (% | ID |
| Number | Site | Site | Site | Site | Sequence (5′ to 3′) | UTC) | No. |
| 1342103 | 144725 | 144742 | N/A | N/A | GCGCTCCACCCCATCCAA | 101 | 740 |
| 1342104 | 144761 | 144778 | N/A | N/A | ACAGTACCCATAATAAAG | 72 | 741 |
| 1342106 | 144721 | 144738 | N/A | N/A | TCCACCCCATCCAAGTTG | 73 | 742 |
| 1342112 | 144756 | 144773 | N/A | N/A | ACCCATAATAAAGGGCTC | 97 | 743 |
| 1342120 | 144681 | 144698 | N/A | N/A | ATAGAAATATATAGTTTG | 94 | 744 |
| 1342121 | 144701 | 144718 | N/A | N/A | GCAAGATTATCCTATACA | 77 | 745 |
| 1366951 | 152906 | 152923 | N/A | N/A | AGCATGAATTTCAGTTTA | 78 | 746 |
| 1366956 | 95421 | 95438 | N/A | N/A | CTAACATTGAAAAGCCCA | 218 | 747 |
| 1366960 | 95461 | 95478 | N/A | N/A | ACAAAAGAAAATCAAAAT | 187 | 748 |
| 1366979 | 110774 | 110791 | N/A | N/A | TTTACCTTCCAATATGCT | 33 | 749 |
| 1366986 | 144765 | 144782 | N/A | N/A | TAATACAGTACCCATAAT | 50 | 750 |
| 1366987 | 95449 | 95466 | N/A | N/A | CAAAATCCAAGTGTTATA | 73 | 751 |
| 1366989 | 110814 | 110831 | N/A | N/A | TAAACAGTTTTTCAAGCA | 71 | 752 |
| 1366993 | 152918 | 152935 | N/A | N/A | AAAGTTGGAATGAGCATG | 109 | 753 |
| 1366994 | 95441 | 95458 | N/A | N/A | AAGTGTTATATTACAAAA | 81 | 754 |
| 1366998 | 152927 | 152944 | N/A | N/A | TTGAAGAGCAAAGTTGGA | 61 | 755 |
| 1367006 | 95453 | 95470 | N/A | N/A | AAATCAAAATCCAAGTGT | 54 | 756 |
| 1367009 | 152949 | 152966 | N/A | N/A | AAATACTACATCTTACAA | 23 | 757 |
| 1367012 | 110802 | 110819 | N/A | N/A | CAAGCAGAAAATTTGAAG | 80 | 758 |
| 1367013 | 110786 | 110803 | N/A | N/A | AGACTAAACACATTTACC | 61 | 759 |
| 1367019 | 144757 | 144774 | N/A | N/A | TACCCATAATAAAGGGCT | 70 | 760 |
| 1367027 | 152910 | 152927 | N/A | N/A | AATGAGCATGAATTTCAG | 74 | 761 |
| 1367028 | 91250 | 91267 | N/A | N/A | TCCCTGTAATCCCAGTTG | 61 | 762 |
| 1367030 | 95457 | 95474 | N/A | N/A | AAGAAAATCAAAATCCAA | 76 | 763 |
| 1367041 | 110778 | 110795 | N/A | N/A | CACATTTACCTTCCAATA | 50 | 764 |
| 1367046 | 152889 | 152906 | N/A | N/A | AGGTCTTGGAGCCTGAAA | 55 | 765 |
| 1367051 | 110830 | 110847 | N/A | N/A | TATACACAATTAAATGTA | 74 | 766 |
| 1367052 | 144685 | 144702 | N/A | N/A | CAAAATAGAAATATATAG | 126 | 767 |
| 1367055 | 91219 | 91236 | N/A | N/A | GGCAGGAGAACAGGAGAA | 89 | 768 |
| 1367062 | 152940 | 152957 | N/A | N/A | ATCTTACAAAGTTTTGAA | 67 | 769 |
| 1367063 | 144689 | 144706 | N/A | N/A | TATACAAAATAGAAATAT | 78 | 770 |
| 1367064 | 110806 | 110823 | N/A | N/A | TTTTCAAGCAGAAAATTT | 65 | 771 |
| 1367065 | 95433 | 95450 | N/A | N/A | TATTACAAAAAGCTAACA | 56 | 772 |
| 1367067 | 110826 | 110843 | N/A | N/A | CACAATTAAATGTAAACA | 68 | 773 |
| 1367070 | 152914 | 152931 | N/A | N/A | TTGGAATGAGCATGAATT | 71 | 774 |
| 1367074 | 152870 | 152887 | N/A | N/A | AGGCTGAAATCAAATAAA | 70 | 775 |
| 1367077 | 152880 | 152897 | N/A | N/A | AGCCTGAAAGAGGCTGAA | 58 | 776 |
| 1367086 | 110782 | 110799 | N/A | N/A | TAAACACATTTACCTTCC | 129 | 777 |
| 1367092 | 144709 | 144726 | N/A | N/A | AAGTTGGAGCAAGATTAT | 229 | 778 |
| 1367094 | 110794 | 110811 | N/A | N/A | AAATTTGAAGACTAAACA | 54 | 779 |
| 1367095 | 152884 | 152901 | N/A | N/A | TTGGAGCCTGAAAGAGGC | 126 | 780 |
| 1367106 | 152958 | 152975 | N/A | N/A | GTTGATAGAAAATACTAC | 63 | 781 |
| 1367111 | 95477 | 95494 | N/A | N/A | TATTGTTAAGGAACACAC | 80 | 782 |
| 1367112 | 91143 | 91160 | N/A | N/A | GCCTGGGTGATGAGAGCA | 45 | 783 |
| 1367118 | 152894 | 152911 | N/A | N/A | AGTTTAGGTCTTGGAGCC | 146 | 784 |
| 1367130 | 91215 | 91232 | N/A | N/A | GGAGAACAGGAGAATCGC | 53 | 785 |
| 1367134 | 95429 | 95446 | N/A | N/A | ACAAAAAGCTAACATTGA | 357 | 786 |
| 1367142 | 95445 | 95462 | N/A | N/A | ATCCAAGTGTTATATTAC | 87 | 787 |
| 1367148 | 152962 | 152979 | N/A | N/A | GAAGGTTGATAGAAAATA | 172 | 788 |
| 1367149 | 95473 | 95490 | N/A | N/A | GTTAAGGAACACACAAAA | 48 | 789 |
| 1367154 | 152936 | 152953 | N/A | N/A | TACAAAGTTTTGAAGAGC | 37 | 790 |
| 1367156 | 152953 | 152970 | N/A | N/A | TAGAAAATACTACATCTT | 33 | 791 |
| 1367158 | 110822 | 110839 | N/A | N/A | ATTAAATGTAAACAGTTT | 54 | 792 |
| 1367159 | 95469 | 95486 | N/A | N/A | AGGAACACACAAAAGAAA | 48 | 793 |
| 1367160 | 152931 | 152948 | N/A | N/A | AGTTTTGAAGAGCAAAGT | 86 | 794 |
| 1367168 | 144693 | 144710 | N/A | N/A | ATCCTATACAAAATAGAA | 67 | 795 |
| 1367170 | 91139 | 91156 | N/A | N/A | GGGTGATGAGAGCAAAAC | 37 | 796 |
| 1367178 | 95465 | 95482 | N/A | N/A | ACACACAAAAGAAAATCA | 39 | 797 |
| 1367181 | 110810 | 110827 | N/A | N/A | CAGTTTTTCAAGCAGAAA | 72 | 798 |
| 1367183 | 152875 | 152892 | N/A | N/A | GAAAGAGGCTGAAATCAA | 49 | 799 |
| 1367186 | 144697 | 144714 | N/A | N/A | GATTATCCTATACAAAAT | 77 | 800 |
| 1367190 | 152866 | 152883 | N/A | N/A | TGAAATCAAATAAAATAG | 38 | 801 |
| 1367199 | 110818 | 110835 | N/A | N/A | AATGTAAACAGTTTTTCA | 118 | 802 |
| 1367201 | 152898 | 152915 | N/A | N/A | TTTCAGTTTAGGTCTTGG | 65 | 803 |
| 1367202 | 91135 | 91152 | N/A | N/A | GATGAGAGCAAAACTCCA | 104 | 804 |
| 1367213 | 110798 | 110815 | N/A | N/A | CAGAAAATTTGAAGACTA | 65 | 805 |
| 1367217 | 152902 | 152919 | N/A | N/A | TGAATTTCAGTTTAGGTC | 53 | 806 |
| 1367224 | 110790 | 110807 | N/A | N/A | TTGAAGACTAAACACATT | 50 | 807 |
| 1367226 | 95481 | 95498 | N/A | N/A | AGGTTATTGTTAAGGAAC | 123 | 808 |
| 1367230 | 152922 | 152939 | N/A | N/A | GAGCAAAGTTGGAATGAG | 72 | 809 |
| 1367234 | 95437 | 95454 | N/A | N/A | GTTATATTACAAAAAGCT | 80 | 810 |
| 1367235 | 95425 | 95442 | N/A | N/A | AAAGCTAACATTGAAAAG | 79 | 811 |
| 1367237 | 152945 | 152962 | N/A | N/A | ACTACATCTTACAAAGTT | 92 | 812 |
| 1367238 | 152860 | 152877 | N/A | N/A | CAAATAAAATAGGTTTAT | 105 | 813 |
| 1367239 | 144713 | 144730 | N/A | N/A | ATCCAAGTTGGAGCAAGA | 112 | 814 |
| 1367241 | 144717 | 144734 | N/A | N/A | CCCCATCCAAGTTGGAGC | 212 | 815 |
| 1367242 | 144705 | 144722 | N/A | N/A | TGGAGCAAGATTATCCTA | 147 | 816 |

TABLE 11
Effect of modified oligonucleotides on amount of human SCNIA RNA
in HepG2 cells

| | SEQ | SEQ | SEQ | SEQ | | | |
|---|---|---|---|---|---|---|---|
| | ID NO: | ID NO: | ID NO: | ID NO: | | SCNIA | SEQ |
| Compound | 1 Start | 1 Stop | 2 Start | 2 Stop | | (% | ID |
| Number | Site | Site | Site | Site | Sequence (5′ to 3′) | UTC) | No. |
| 1342083 | 144866 | 144883 | N/A | N/A | GTATTTTCCCTACTGTGG | 43 | 817 |
| 1342084 | 144871 | 144888 | N/A | N/A | ATAATGTATTTTCCCTAC | 261 | 818 |
| 1342085 | 144886 | 144903 | N/A | N/A | GGGATTAGGATGTAAATA | 105 | 819 |
| 1342086 | 144920 | 144937 | N/A | N/A | TTTTTCAAATGAAATTTA | 100 | 820 |
| 1342087 | 144861 | 144878 | N/A | N/A | TTCCCTACTGTGGTGCAA | 44 | 821 |
| 1342088 | 144876 | 144893 | N/A | N/A | TGTAAATAATGTATTTTC | 71 | 822 |
| 1342089 | 144911 | 144928 | N/A | N/A | TGAAATTTAAGACAATTG | 51 | 823 |
| 1342090 | 144881 | 144898 | N/A | N/A | TAGGATGTAAATAATGTA | 96 | 824 |
| 1342091 | 144902 | 144919 | N/A | N/A | AGACAATTGAAAAGAGGG | 91 | 825 |
| 1342092 | 144916 | 144933 | N/A | N/A | TCAAATGAAATTTAAGAC | 68 | 826 |
| 1342093 | 144906 | 144923 | N/A | N/A | TTTAAGACAATTGAAAAG | 94 | 827 |
| 1342094 | 144821 | 144838 | N/A | N/A | TCCCTCACCCCACTACAC | 80 | 828 |
| 1342095 | 144791 | 144808 | N/A | N/A | GCAAGGATTAAAGGTAGC | 83 | 829 |
| 1342096 | 144816 | 144833 | N/A | N/A | CACCCCACTACACATAAG | 58 | 830 |
| 1342097 | 144784 | 144801 | N/A | N/A | TTAAAGGTAGCAAAAGGG | 101 | 831 |
| 1342098 | 144796 | 144813 | N/A | N/A | ACAGTGCAAGGATTAAAG | 120 | 832 |
| 1342099 | 144801 | 144818 | N/A | N/A | AAGTCACAGTGCAAGGAT | 8 | 833 |
| 1342100 | 144806 | 144823 | N/A | N/A | CACATAAGTCACAGTGCA | 49 | 834 |
| 1342101 | 144786 | 144803 | N/A | N/A | GATTAAAGGTAGCAAAAG | 88 | 835 |
| 1342102 | 144811 | 144828 | N/A | N/A | CACTACACATAAGTCACA | 82 | 836 |
| 1342103 | 144725 | 144742 | N/A | N/A | GCGCTCCACCCCATCCAA | 107 | 740 |
| 1342104 | 144761 | 144778 | N/A | N/A | ACAGTACCCATAATAAAG | 55 | 741 |
| 1342105 | 144706 | 144723 | N/A | N/A | TTGGAGCAAGATTATCCT | 88 | 510 |
| 1342106 | 144721 | 144738 | N/A | N/A | TCCACCCCATCCAAGTTG | 71 | 742 |
| 1342107 | 144766 | 144783 | N/A | N/A | GTAATACAGTACCCATAA | 102 | 511 |
| 1342108 | 144716 | 144733 | N/A | N/A | CCCATCCAAGTTGGAGCA | 70 | 664 |
| 1342109 | 144753 | 144770 | N/A | N/A | CATAATAAAGGGCTCAGG | 89 | 512 |
| 1342110 | 144711 | 144728 | N/A | N/A | CCAAGTTGGAGCAAGATT | 97 | 587 |
| 1342111 | 144768 | 144785 | N/A | N/A | GGGTAATACAGTACCCAT | 51 | 665 |
| 1342112 | 144756 | 144773 | N/A | N/A | ACCCATAATAAAGGGCTC | 84 | 743 |
| 1342113 | 144666 | 144683 | N/A | N/A | TTGTTATTAGTTAGAAAT | 106 | 837 |
| 1342114 | 144661 | 144678 | N/A | N/A | ATTAGTTAGAAATCTGAT | 88 | 838 |
| 1342115 | 144691 | 144708 | N/A | N/A | CCTATACAAAATAGAAAT | 97 | 588 |
| 1342116 | 144676 | 144693 | N/A | N/A | AATATATAGTTTGTTATT | 68 | 839 |
| 1342117 | 144671 | 144688 | N/A | N/A | ATAGTTTGTTATTAGTTA | 94 | 840 |
| 1342118 | 144686 | 144703 | N/A | N/A | ACAAAATAGAAATATATA | 117 | 513 |
| 1342119 | 144656 | 144673 | N/A | N/A | TTAGAAATCTGATATGAC | 97 | 841 |
| 1342120 | 144681 | 144698 | N/A | N/A | ATAGAAATATATAGTTTG | 100 | 744 |
| 1342121 | 144701 | 144718 | N/A | N/A | GCAAGATTATCCTATACA | 51 | 745 |
| 1342122 | 144696 | 144713 | N/A | N/A | ATTATCCTATACAAAATA | 70 | 666 |
| 1342123 | 144646 | 144663 | N/A | N/A | GATATGACAGAACATTTG | 74 | 842 |
| 1342124 | 144615 | 144632 | N/A | N/A | TTCATGATGCTCTCCGTC | 67 | 843 |
| 1342125 | 144613 | 144630 | N/A | N/A | CATGATGCTCTCCGTCTG | 50 | 844 |
| 1342126 | 144617 | 144634 | N/A | N/A | TGTTCATGATGCTCTCCG | 68 | 845 |
| 1342127 | 144619 | 144636 | N/A | N/A | TTTGTTCATGATGCTCTC | 65 | 846 |
| 1342128 | 144633 | 144650 | N/A | N/A | ATTTGGTGTTACTTTTTG | 67 | 847 |
| 1342129 | 144621 | 144638 | N/A | N/A | TTTTTGTTCATGATGCTC | 34 | 848 |
| 1342130 | 144636 | 144653 | N/A | N/A | AACATTTGGTGTTACTTT | 82 | 849 |
| 1342131 | 144641 | 144658 | N/A | N/A | GACAGAACATTTGGTGTT | 57 | 850 |
| 1342132 | 144651 | 144668 | N/A | N/A | AATCTGATATGACAGAAC | 58 | 851 |
| 1342133 | 144609 | 144626 | N/A | N/A | ATGCTCTCCGTCTGTTTC | 70 | 852 |
| 1342134 | 144571 | 144588 | N/A | N/A | TTCTTTTGAAAAAGAAGG | 107 | 853 |
| 1342135 | 144591 | 144608 | N/A | N/A | CCTATCCATTAAGACTTG | 56 | 854 |
| 1342136 | 144606 | 144623 | N/A | N/A | CTCTCCGTCTGTTTCCCT | 103 | 855 |
| 1342137 | 144581 | 144598 | N/A | N/A | AAGACTTGAGTTCTTTTG | 51 | 856 |
| 1342138 | 144601 | 144618 | N/A | N/A | CGTCTGTTTCCCTATCCA | 101 | 857 |
| 1342139 | 144586 | 144603 | N/A | N/A | CCATTAAGACTTGAGTTC | 40 | 858 |
| 1342140 | 144596 | 144613 | N/A | N/A | GTTTCCCTATCCATTAAG | 68 | 859 |
| 1342141 | 144576 | 144593 | N/A | N/A | TTGAGTTCTTTTGAAAAA | 98 | 860 |
| 1342142 | 144611 | 144628 | N/A | N/A | TGATGCTCTCCGTCTGTT | 35 | 861 |
| 1342143 | 144856 | 144873 | N/A | N/A | TACTGTGGTGCAATAATA | 69 | 862 |
| 1342144 | 144536 | 144553 | N/A | N/A | GTTAGGAAATTAAAAATA | 94 | 863 |
| 1342145 | 144556 | 144573 | N/A | N/A | AGGTATTTAAGATTTCCT | 56 | 864 |
| 1342146 | 144848 | 144865 | N/A | N/A | TGCAATAATAGTACCCTT | 72 | 865 |
| 1342147 | 144546 | 144563 | N/A | N/A | GATTTCCTAGGTTAGGAA | 62 | 866 |
| 1342148 | 144561 | 144578 | N/A | N/A | AAAGAAGGTATTTAAGAT | 79 | 867 |
| 1342149 | 144851 | 144868 | N/A | N/A | TGGTGCAATAATAGTACC | 80 | 868 |
| 1342150 | 144541 | 144558 | N/A | N/A | CCTAGGTTAGGAAATTAA | 79 | 869 |
| 1342151 | 144551 | 144568 | N/A | N/A | TTTAAGATTTCCTAGGTT | 56 | 870 |
| 1342152 | 144566 | 144583 | N/A | N/A | TTGAAAAAGAAGGTATTT | 60 | 871 |
| 1342153 | 144836 | 144853 | N/A | N/A | ACCCTTCCCAATCCCTCC | 63 | 872 |
| 1342154 | 144840 | 144857 | N/A | N/A | TAGTACCCTTCCCAATCC | 75 | 873 |
| 1342155 | 144844 | 144861 | N/A | N/A | ATAATAGTACCCTTCCCA | 34 | 874 |
| 1342156 | 144846 | 144863 | N/A | N/A | CAATAATAGTACCCTTCC | 45 | 875 |
| 1342157 | 144831 | 144848 | N/A | N/A | TCCCAATCCCTCCCTCAC | 65 | 876 |
| 1342158 | 144826 | 144843 | N/A | N/A | ATCCCTCCCTCACCCCAC | 63 | 877 |
| 1342159 | 144838 | 144855 | N/A | N/A | GTACCCTTCCCAATCCCT | 43 | 878 |
| 1342160 | 144842 | 144859 | N/A | N/A | AATAGTACCCTTCCCAAT | 139 | 879 |

### Example 3: Activity of Human-Mouse Cross-Reactive Modified Oligonucleotides Against Mouse SCN1A in Primary Mouse Cerebral Neuron Cells, Single Dose, In Vitro

[0289] Certain modified oligonucleotides described above were tested for their effect on mouse SCN1A RNA levels in vitro.

[0290] The modified oligonucleotides in the tables below are 18 nucleosides in length. Each nucleoside comprises a 2′-MOE sugar moiety. The intemucleoside linkages throughout each modified oligonucleotide are phosphorothioate internucleoside linkages. All cytosine nucleobases throughout each modified oligonucleotide are 5-methylcytosines.

[0291] “Start site” indicates the 5′-most nucleoside of the target sequence to which the modified oligonucleotide is complementary. “Stop site” indicates the 3′-most nucleoside of the target sequence to which the modified oligonucleotide is complementary. As shown in the tables below, the modified oligonucleotides are complementary to the human SCN1A genomic sequence, designated herein as SEQ ID NO: 1 (the complement of GENBANK Accession No. NC_000002.12 truncated from nucleotides 165982001 to 166152000) and the mouse SCN1A genomic sequence, designated herein as SEQ ID NO: 3 (the complement of GENBANK Accession No. NC_000068.7 truncated from nucleotides 66268001 to 66444000).

[0292] Cultured primary mouse cerebral neuron cells at a density of 60,000 cells per well were treated by free uptake with 8000 nM of modified oligonucleotide. After a treatment period of approximately 3 days, RNA was isolated from the cells and the amount of SCN1A RNA that excludes the mouse form of NIE-1 (NIE-1⁻), and the amount of SCN1A RNA that includes the mouse form of NIE-1 (NIE-1⁺) were measured by quantitative real-time RTPCR. Mouse primer probe set RTS48951 (forward sequence CCCTAAGAGCCTTATCACGATTT, designated herein as SEQ ID NO: 24; reverse sequence GGCAAACCAGAAGCACATTC, designated herein as SEQ ID NO: 25; probe sequence AGGGTGGTTGTGAATGCCCTGTTA, designated herein as SEQ ID NO: 26) was used to measure the amount of SCN1A transcript that excludes the mouse form of NIE-1 (NIE-1⁻). Mouse primer probe set RTS48949 (forward sequence AGCCCTTTATTATGGGTGGTT, designated herein as SEQ ID NO: 21; reverse sequence CCAGAATATAAGGCAAACCAGAAG, designated herein as SEQ ID NO: 22; probe sequence TGGATGGAATTGCTCCTAACAGGGC, designated herein as SEQ ID NO: 23) was used to measure the amount of SCN1A transcript that includes the mouse form of NIE-1 (NIE-1⁺). SCN1A RNA levels were normalized to total RNA content, as measured by RIBOGREEN@. SCN1A NIE-1⁻RNA and NIE-1⁺RNA are presented as % of the average of untreated control (% UTC). Values marked with a “ [symbol] ” result from oligonucleotides that are complementary to the amplicon region of the primer probe set. Additional assays may be used to measure the potency and efficacy of the modified oligonucleotides complementary to the amplicon region.

[0293] As shown in the tables below, certain modified oligonucleotides complementary to a SCN1A nucleic acid increased the amount ofSCN1A RNA that excludes the mouse form of NIE-1 (NIE-1⁻) and reduced the amount ofSCN1A RNA that includes the mouse form of NIE-1 (NIE-1⁺), compared to untreated control.

TABLE 12
Effect of modified oligonucleotides on the amount of mouse SCN1A RNA excluding
NIE-1 (NIE-1⁻) and the amount of mouse SCNIA RNA including NIE-1 (NIE-1⁻)
in primary mouse cerebral neuron cells

| | SEQ | SEQ | SEQ | SEQ | | | | |
|---|---|---|---|---|---|---|---|---|
| | ID NO: | ID NO: | ID NO: | ID NO: | | SCNIA | SCNIA | |
| | 1 Start | 1 Stop | 3 Start | 3 Stop | | (% UTC) | (% UTC) | SEQ |
| Compound | Site | Site | Site | Site | | RTS48949 | RTS48951 | ID |
| Number | Human | Human | Mouse | Mouse | Sequence (5′ to 3′) | NIE-1⁺ | NIE-1⁻ | No. |
| 1342097 | 144784 | 144801 | 150182 | 150199 | TTAAAGGTAGCAAAAGGG | 96 | 69 | 831 |
| 1342104 | 144761 | 144778 | 150159 | 150176 | ACAGTACCCATAATAAAG | 68‡ | 248 | 741 |
| 1342105 | 144706 | 144723 | 150104 | 150121 | TTGGAGCAAGATTATCCT | 30 | 549 | 510 |
| 1342106 | 144721 | 144738 | 150119 | 150136 | TCCACCCCATCCAAGTTG | 111 | 155 | 742 |
| 1342107 | 144766 | 144783 | 150164 | 150181 | GTAATACAGTACCCATAA | 551 | 346 | 511 |
| 1342108 | 144716 | 144733 | 150114 | 150131 | CCCATCCAAGTTGGAGCA | 46 | 349 | 664 |
| 1342110 | 144711 | 144728 | 150109 | 150126 | CCAAGTTGGAGCAAGATT | 15 | 647 | 587 |
| 1342111 | 144768 | 144785 | 150166 | 150183 | GGGTAATACAGTACCCAT | 104‡ | 107 | 665 |
| 1366954 | 144703 | 144720 | 150101 | 150118 | GAGCAAGATTATCCTATA | 16 | 644 | 590 |
| 1366958 | 144722 | 144739 | 150120 | 150137 | CTCCACCCCATCCAAGTT | 113 | 122 | 515 |
| 1366971 | 144762 | 144779 | 150160 | 150177 | TACAGTACCCATAATAAA | 72‡ | 465 | 519 |
| 1366982 | 144710 | 144727 | 150108 | 150125 | CAAGTTGGAGCAAGATTA | 9 | 696 | 523 |
| 1366986 | 144765 | 144782 | 150163 | 150180 | TAATACAGTACCCATAAT | 52‡ | 333 | 750 |
| 1367004 | 144682 | 144699 | 150080 | 150097 | AATAGAAATATATAGTTT | 60 | 264 | 529 |
| 1367019 | 144757 | 144774 | 150155 | 150172 | TACCCATAATAAAGGGCT | 54‡ | 125 | 760 |
| 1367043 | 144712 | 144729 | 150110 | 150127 | TCCAAGTTGGAGCAAGAT | 54 | 450 | 692 |
| 1367047 | 144758 | 144775 | 150156 | 150173 | GTACCCATAATAAAGGGC | 86‡ | 146 | 539 |
| 1367071 | 144760 | 144777 | 150158 | 150175 | CAGTACCCATAATAAAGG | 67‡ | 224 | 694 |
| 1367076 | 144704 | 144721 | 150102 | 150119 | GGAGCAAGATTATCCTAT | 29 | 510 | 696 |
| 1367089 | 144684 | 144701 | 150082 | 150099 | AAAATAGAAATATATAGT | 83 | 180 | 703 |
| 1367092 | 144709 | 144726 | 150107 | 150124 | AAGTTGGAGCAAGATTAT | 14 | 642 | 778 |
| 1367098 | 144714 | 144731 | 150112 | 150129 | CATCCAAGTTGGAGCAAG | 41 | 421 | 550 |
| 1367121 | 144719 | 144736 | 150117 | 150134 | CACCCCATCCAAGTTGGA | 110 | 215 | 628 |
| 1367131 | 144724 | 144741 | 150122 | 150139 | CGCTCCACCCCATCCAAG | 82 | 86 | 716 |
| 1367135 | 144759 | 144776 | 150157 | 150174 | AGTACCCATAATAAAGGG | 67‡ | 214 | 634 |
| 1367144 | 144720 | 144737 | 150118 | 150135 | CCACCCCATCCAAGTTGG | 81 | 182 | 722 |
| 1367155 | 144723 | 144740 | 150121 | 150138 | GCTCCACCCCATCCAAGT | 128 | 102 | 637 |
| 1367174 | 144763 | 144780 | 150161 | 150178 | ATACAGTACCCATAATAA | 57‡ | 395 | 642 |
| 1367182 | 144715 | 144732 | 150113 | 150130 | CCATCCAAGTTGGAGCAA | 44 | 431 | 645 |
| 1367184 | 144767 | 144784 | 150165 | 150182 | GGTAATACAGTACCCATA | 851 | 210 | 646 |
| 1367189 | 144718 | 144735 | 150116 | 150133 | ACCCCATCCAAGTTGGAG | 117 | 185 | 575 |
| 1367218 | 144707 | 144724 | 150105 | 150122 | GTTGGAGCAAGATTATCC | 9 | 727‡ | 655 |
| 1367219 | 144764 | 144781 | 150162 | 150179 | AATACAGTACCCATAATA | 97‡ | 511 | 736 |
| 1367221 | 144683 | 144700 | 150081 | 150098 | AAATAGAAATATATAGTT | 74 | 294 | 656 |
| 1367239 | 144713 | 144730 | 150111 | 150128 | ATCCAAGTTGGAGCAAGA | 37 | 514 | 814 |
| 1367241 | 144717 | 144734 | 150115 | 150132 | CCCCATCCAAGTTGGAGC | 99 | 184 | 815 |
| 1367242 | 144705 | 144722 | 150103 | 150120 | TGGAGCAAGATTATCCTA | 72 | 430 | 816 |
| 1369834 | 144772 | 144789 | 150170 | 150187 | AAAGGGGTAATACAGTAC | 47 | 324 | 880 |
| 1369835 | 144779 | 144796 | 150177 | 150194 | GGTAGCAAAAGGGGTAAT | 24 | 463 | 881 |
| 1369836 | 144774 | 144791 | 150172 | 150189 | CAAAAGGGGTAATACAGT | 44 | 448 | 882 |
| 1369838 | 144771 | 144788 | 150169 | 150186 | AAGGGGTAATACAGTACC | 691 | 283 | 883 |
| 1369840 | 144781 | 144798 | 150179 | 150196 | AAGGTAGCAAAAGGGGTA | 102 | 64 | 884 |
| 1369841 | 144776 | 144793 | 150174 | 150191 | AGCAAAAGGGGTAATACA | 19 | 579 | 885 |
| 1369851 | 144770 | 144787 | 150168 | 150185 | AGGGGTAATACAGTACCC | 90‡ | 148 | 886 |
| 1369854 | 144769 | 144786 | 150167 | 150184 | GGGGTAATACAGTACCCA | 97‡ | 137 | 887 |
| 1369856 | 144775 | 144792 | 150173 | 150190 | GCAAAAGGGGTAATACAG | 48 | 317 | 888 |
| 1369870 | 144782 | 144799 | 150180 | 150197 | AAAGGTAGCAAAAGGGGT | 63 | 53 | 889 |

### Example 4: Activity of Modified Oligonucleotides Targeting Human SCN1A in HepG2 Cells, Multiple Dose, In Vitro

[0294] Certain modified oligonucleotides described in the studies above were selected and tested at various doses in HepG2 cells.

[0295] The modified oligonucleotides were tested in a series of experiments using the same culture conditions. The results for each experiment are presented in separate tables shown below. Cultured HepG2 cells at a density of 20,000 cells per well were transfected using electroporation with modified oligonucleotides diluted to different concentrations as specified in the tables below. After a treatment period of approximately 24 hours, full-length SCN1A RNA levels were measured as previously described using the human RTS48189 primer-probe set. Full-length SCN1A RNA levels were normalized to total RNA, as measured by RIBOGREEN®. Full-length SCN1A RNA is presented as % of the average of untreated control (%% UTC). Also provided is the fold increase of full-length SCN1A RNA over the untreated control (fold increase over UTC) at the 20 μM dose. As shown in the tables below, certain modified oligonucleotides complementary to SCN1A RNA increased the amount of human full-length SCN1A RNA, compared to untreated control.

TABLE 13
Effect of modified oligonucleotides on the amount
of human full-length SCN1A RNA in HepG2 cells,
multiple dose

| | | | | | Fold |
|---|---|---|---|---|---|
| | | | | | increase |
| | % UTC | | | | over |
| | 312.5 | 1250 | 5000 | 20000 | UTC @ |
| Compound No. | nM | nM | nM | nM | 20 μM |
| 1342118 | 78 | 88 | 96 | 73 | 0.7 |
| 1367236 | 148 | 91 | 105 | 147 | 1.5 |
| 1367011 | 100 | 85 | 85 | 89 | 0.9 |
| 1366977 | 81 | 64 | 19 | 41 | 0.4 |
| 1367098 | 138 | 80 | 96 | 117 | 1.2 |
| 1367121 | 66 | 79 | 95 | 64 | 0.6 |
| 1367163 | 81 | 138 | 61 | 115 | 1.2 |
| 1367214 | 104 | 81 | 69 | 48 | 0.5 |
| 1366982 | 116 | 128 | 142 | 137 | 1.4 |
| 1367155 | 89 | 67 | 144 | 126 | 1.3 |
| 1367182 | 114 | 80 | 64 | 38 | 0.4 |
| 1366952 | 86 | 88 | 66 | 114 | 1.1 |
| 1367014 | 80 | 63 | 85 | 49 | 0.5 |
| 1367184 | 104 | 71 | 67 | 45 | 0.4 |
| 1367240 | 86 | 90 | 95 | 124 | 1.2 |
| 1366980 | 78 | 55 | 79 | 73 | 0.7 |
| 1367134 | 124 | 58 | 78 | 73 | 0.7 |
| 1367147 | 140 | 110 | 123 | 207 | 2.1 |
| 1367232 | 121 | 84 | 116 | 72 | 0.7 |

TABLE 14
Effect of modified oligonucleotides on the amount
of human full-length SCN1A RNA in HepG2 cells,
multiple dose

| | | | | | Fold |
|---|---|---|---|---|---|
| | | | | | increase |
| | % UTC | | | | over |
| | 312.5 | 1250 | 5000 | 20000 | UTC @ |
| Compond No. | nM | nM | nM | nM | 20 μM |
| 1367020 | 63 | 108 | 64 | 92 | 0.9 |
| 1366961 | 98 | 76 | 64 | 62 | 0.6 |
| 1367059 | 73 | 138 | 110 | 169 | 1.7 |
| 1367040 | 56 | 41 | 53 | 76 | 0.8 |
| 1367135 | 110 | 130 | 120 | 136 | 1.4 |
| 1366962 | 65 | 99 | 79 | 147 | 1.5 |
| 1367107 | 93 | 103 | 93 | 153 | 1.5 |
| 1367119 | 101 | 99 | 89 | 86 | 0.9 |
| 1367131 | 84 | 167 | 106 | 178 | 1.8 |
| 1367032 | 56 | 55 | 103 | 67 | 0.7 |
| 1366960 | 89 | 105 | 74 | 38 | 0.4 |
| 1367211 | 100 | 113 | 118 | 131 | 1.3 |
| 1367092 | 87 | 83 | 179 | 95 | 0.9 |
| 1367148 | 86 | 116 | 81 | 44 | 0.4 |
| 1367132 | 107 | 117 | 75 | 142 | 1.4 |
| 1366956 | 80 | 87 | 58 | 63 | 0.6 |
| 1367134 | 89 | 106 | 89 | 83 | 0.8 |
| 1367241 | 104 | 110 | 73 | 86 | 0.9 |

TABLE 15
Effect of modified oligonucleotides on the amount
of human full-length SCN1A RNA expression in HepG2
cells, multiple dose

| | | | | | Fold |
|---|---|---|---|---|---|
| | | | | | increase |
| | % UTC | | | | over |
| | 312.5 | 1250 | 5000 | 20000 | UTC @ |
| Compound No. | nM | nM | nM | nM | 20 μM |
| 1367242 | 197 | 189 | 403 | 388 | 3.9 |
| 1366993 | 59 | 78 | 77 | 63 | 0.6 |
| 1367118 | 63 | 79 | 65 | 80 | 0.8 |
| 1367238 | 77 | 81 | 84 | 65 | 0.7 |
| 1367086 | 95 | 65 | 69 | 111 | 1.1 |
| 1366994 | 100 | 65 | 69 | 52 | 0.5 |
| 1367095 | 113 | 155 | 153 | 170 | 1.7 |
| 1342084 | 133 | 100 | 132 | 207 | 2.1 |
| 1367052 | 108 | 113 | 118 | 114 | 1.1 |
| 1342160 | 103 | 119 | 112 | 66 | 0.7 |
| 1342120 | 85 | 79 | 78 | 103 | 1.0 |
| 1367226 | 70 | 82 | 125 | 66 | 0.7 |
| 1342098 | 92 | 63 | 95 | 78 | 0.8 |
| 1342141 | 46 | 76 | 61 | 49 | 0.5 |
| 1367199 | 81 | 109 | 133 | 136 | 1.4 |
| 1342118 | 120 | 99 | 93 | 95 | 0.9 |
| 1367134 | 70 | 61 | 62 | 124 | 1.2 |
| 1367239 | 122 | 109 | 105 | 180 | 1.8 |
| 1342103 | 115 | 110 | 94 | 90 | 0.9 |

### Example 5: Activity of Human-Mouse Cross-Reactive Modified Oligonucleotides Against Mouse SCN1A in Primary Mouse Cerebral Neuron Cells, Multiple Dose, In Vitro

[0296] Certain modified oligonucleotides described in the studies above were tested at various doses in primary mouse cerebral neuron cells. The modified oligonucleotides were tested in a series of experiments using the same culture conditions.

[0297] Cultured primary mouse cerebral neuron cells at a density of 60,000 cells per well were treated by free uptake with modified oligonucleotides diluted to different concentrations as specified in the tables below. After a treatment period of approximately 3 days, mouse primer probe set RTS48951 (described herein above) was used to measure the amount of mouse SCN1A RNA that excludes NIE-1 (NIE-1⁻), and mouse primer probe set RTS48949 (described herein above) was used to measure the amount of mouse SCN1A RNA that includes NIE-1 (NIE-1⁺). SCN1A RNA levels were normalized to total RNA content, as measured by RIBOGREEN®. SCN1A RNA is presented as % of the average of untreated control (% UTC). Values marked with a “ [symbol] ” result from oligonucleotides that are complementary to the amplicon region of the primer probe set. Additional assays may be used to measure the potency and efficacy of the modified oligonucleotides complementary to the amplicon region. Also provided is the fold increase of (NIE-1⁻)SCN1A RNA over the untreated control (fold increase over UTC) at the 8 μM dose. The half maximal inhibitory concentration (IC₅₀) was calculated using a linear regression on a log/linear plot of the data in Excel; an IC₅₀ of >8 μM in the tables below indicates that the value was not calculatable.

[0298] As shown in the tables below, certain modified oligonucleotides complementary to a SCN1A nucleic acid increased the amount of SCN1A RNA that excludes the mouse form of NIE-1 (NIE-1⁻) and reduced the amount of SCN1A RNA that includes the mouse form of NIE-1 (NIE-1⁺), compared to untreated control.

TABLE 16
Effect of modified oligonucleotides on the amount of mouse SCN1A
RNA excluding NIE-1 (NIE-1⁻) and the amount of SCN1A RNA including
(NIE-1⁺) in primary mouse cerebral neuron cells, multiple doses

| | | | | | | NIE-1⁻ | | | | |
|---|---|---|---|---|---|---|---|---|---|---|
| | NIE-1⁺ | | | | | | | | | Fold |
| | % UTC | | | | | % UTC | | | | increase |
| Compound | 64 | 320 | 1600 | 8000 | IC₅₀ | 64 | 320 | 1600 | 8000 | over UTC |
| No. | nM | nM | nM | nM | μM | nM | nM | nM | nM | 8 μM |
| 1369834 | 149 | 143 | 126 | 80 | >8.0 | 137 | 162 | 292 | 817 | 8.2 |
| 1367174 | 111‡ | 102‡ | 87‡ | 62‡ | >8.0 | 145 | 208 | 344 | 1059 | 10.6 |
| 1369856 | 133 | 142 | 100 | 55 | >8.0 | 149 | 171 | 322 | 968 | 9.7 |
| 1366971 | 100‡ | 102‡ | 92‡ | 76‡ | >8.0 | 124 | 170 | 305 | 849 | 8.5 |
| 1366986 | 89‡ | 77‡ | 75‡ | 56‡ | >8.0 | 98 | 121 | 250 | 584 | 5.8 |
| 1342107 | 79‡ | 76‡ | 74‡ | 44‡ | >8.0 | 122 | 152 | 295 | 805 | 8.0 |
| 1367242 | 97 | 80 | 70 | 39 | 4.7 | 119 | 169 | 397 | 885 | 8.8 |
| 1367219 | 79‡ | 73‡ | 71‡ | 51‡ | >8.0 | 139 | 178 | 353 | 692 | 6.9 |
| 1367004 | 81 | 86 | 81 | 75 | >8.0 | 94 | 107 | 181 | 487 | 4.9 |
| 1369838 | 149‡ | 130‡ | 130‡ | 80‡ | >8.0 | 127 | 153 | 254 | 409 | 4.1 |
| 1367221 | 96 | 103 | 111 | 74 | >8.0 | 94 | 113 | 168 | 444 | 4.4 |
| 1342104 | 103‡ | 98‡ | 97‡ | 76‡ | >8.0 | 125 | 126 | 172 | 378 | 3.8 |
| 1367071 | 123‡ | 126‡ | 120‡ | 81‡ | >8.0 | 125 | 119 | 174 | 340 | 3.4 |
| 1367135 | 140‡ | 115‡ | 88‡ | 93‡ | >8.0 | 94 | 117 | 160 | 321 | 3.2 |

TABLE 17
Effect of modified oligonucleotides on amount of mouse
SCN1A RNA including (NIE-1⁺) or excluding NIE-1
(NIE-1⁻) in primary mouse cerebral neuron cells, multiple doses

| | | | | | | NIE-1⁻ | | | | |
|---|---|---|---|---|---|---|---|---|---|---|
| | | | | | | | | | | Fold |
| | | | | | | | | | | increase |
| | NIE-1⁺ | | | | | | | | | over |
| | % UTC | | | | | % UTC | | | | UTC |
| Compound | 64 | 320 | 1600 | 8000 | IC₅₀ | 64 | 320 | 1600 | 8000 | 8 |
| No. | nM | nM | nM | nM | μM | nM | nM | nM | nM | μM |
| 1367218 | 56 | 39 | 22 | 3 | 0.1 | 252 | 346 | 634 | 1084 | 10.8 |
| 1366982 | 59 | 41 | 14 | 3 | 0.1 | 241 | 336 | 737 | 1089 | 10.9 |
| 1367092 | 60 | 46 | 20 | 2 | 0.2 | 225 | 280 | 619 | 1044 | 10.4 |
| 1342110 | 62 | 42 | 16 | 6 | 0.2 | 151 | 246 | 366 | 797 | 8.0 |
| 1366954 | 51 | 36 | 14 | 4 | 0.1 | 170 | 248 | 517 | 770 | 7.7 |
| 1369841 | 145 | 110 | 56 | 10 | 2.1 | 180 | 233 | 622 | 801 | 8.0 |
| 1369835 | 129 | 62 | 43 | 15 | 1.2 | 164 | 197 | 447 | 578 | 5.8 |
| 1342105 | 81 | 62 | 46 | 13 | 0.8 | 143 | 187 | 346 | 683 | 6.8 |
| 1367076 | 88 | 72 | 65 | 15 | 1.5 | 138 | 184 | 419 | 721 | 7.2 |
| 1367239 | 86 | 84 | 63 | 18 | 1.8 | 100 | 185 | 427 | 565 | 5.7 |
| 1367098 | 92 | 109 | 69 | 31 | 4.3 | 80 | 111 | 239 | 477 | 4.8 |
| 1369836 | 120 | 97 | 65 | 14 | 2.2 | 101 | 95 | 223 | 426 | 4.3 |
| 1367182 | 132 | 103 | 81 | 38 | 5.4 | 103 | 130 | 254 | 415 | 4.1 |
| 1367043 | 108 | 83 | 93 | 39 | >8.0 | 129 | 187 | 352 | 559 | 5.6 |
| 1342108 | 136 | 88 | 85 | 45 | 6.9 | 99 | 95 | 188 | 351 | 3.5 |

### Example 6: Activity of Modified Oligonucleotides Targeting SCN1A in Wildtype Mice

[0299] Wildtype C571BL/6 mice were divided into groups of 4 mice each. Each mouse received a single ICV bolus of Compound No. 1429226 or comparator compound 1367010 at the dose indicated in the tables below. A group of 4 mice received PBS as a negative control.

[0300] Compound No. 1429226, described hereinabove, is a modified oligonucleotide having a nucleobase sequence of (from 5′ to 3′) AGTTGGAGCAAGATTATC (SLQ ID NO: 41), wherein each nucleoside comprises a 2′-NMA sugar moiety, each intemucleoside linkage is a phosphorothioate intemucleoside linkage, and each cytosine is a 5-methyl cytosine. Comparator compound 1367010, previously described in WO 2019/040923 (incorporated herein by reference) as Compound Ex 20X+1 has a nucleobase sequence of (from 5′ to 3′) AGTTGGAGCAAGATTATC (SEQ ID NO: 41), wherein each nucleoside comprises a 2′-MOE sugar moiety and each intemucleoside linkage is a phosphorothioate intemucleoside linkage. SEQ ID NO:41 is 100% complementary to SEQ ID NO: 1, from Start Site 144708 to Stop Site 144725, and is 100% complementary to SEQ ID NO: 3 from Start Site 150106 to Stop Site 150123. “Start site” indicates the 5′-most nucleoside to which the modified oligonucleotide is complementary in the target nucleic acid sequence. “Stop site” indicates the 3′-most nucleoside to which the modified oligonucleotide is complementary in the target nucleic acid sequence.

[0301] Three weeks post treatment mice were sacrificed and RNA was extracted from cortical brain tissue and spinal cord for real-time qPCR analysis of SCN1A RNA using primer probe set RTS48951 (described herein above) to measure the amount of SCN1A RNA that excludes the mouse form of NIE-1 (NIE-1⁻) and primer probe set RTS48949 (described herein above) to measure the amount of SCN1A RNA that includes the mouse form of NIE-1 (NIE-1⁺). SCN1A RNA is presented as % of the average of untreated control (% UTC), normalized to mouse GAPDH. Mouse GAPDH was amplified using primer probe set mGapdh_LTS00102 (forward sequence GGCAAATTCAACGGCACAGT, designated herein as SEQ ID NO: 36; reverse sequence GGGTCTCGCTCCTGGAAGAT, designated herein as SEQ ID NO: 37; probe sequence AAGGCCGAGAATGGGAAGCTTGTCATC, designated herein as SEQ ID NO: 38). Each of Tables 18 and 19 represents a different experiment.

[0302] As shown in the tables below, Compound No. 1429226 is more potent than comparator compound 1367010 in this assay.

TABLE 18
Effect of modified oligonucleotides on the amount of mouse
SCN1A excluding NIE-1 (NIE-1⁻) and the amount of mouse SCN1A
RNA including (NIE-1⁺) in wildtype mice, multiple doses

| | | SPINAL CORD | | | CORTEX | | |
|---|---|---|---|---|---|---|---|
| | | | NIE-1⁺ | | | NIE-1⁺ | |
| Compound | Dose | NIE-1⁻ | | ED₅₀ | NIE-1⁻ | | ED₅₀ |
| No. | (μg) | % UTC | % UTC | (μg) | % UTC | % UTC | (μg) |
| 1367010 | 1 | 82 | 88 | 50 | 111 | 94 | 78 |
| | 3 | 93 | 91 | | 109 | 96 | |
| | 10 | 98 | 76 | | 103 | 95 | |
| | 30 | 90 | 64 | | 119 | 84 | |
| | 100 | 103 | 33 | | 149 | 38 | |
| | 300 | 104 | 23 | | 176 | 13 | |
| | 700 | 108 | 18 | | 173 | 3 | |

TABLE 19
Effect of modified oligonucleotides on amount of mouse SCN1A
excluding NIE-1 (NIE-1⁻) and the amount of mouse
SCN1A RNA including (NIE-1⁺) in wildtype mice, multiple doses

| | | SPINAL CORD | | | CORTEX | | |
|---|---|---|---|---|---|---|---|
| | | | NIE-1⁺ | | | NIE-1⁺ | |
| Compound | Dose | NIE-1⁻ | | ED₅₀ | NIE-1⁻ | | ED₅₀ |
| No. | (μg) | % UTC | % UTC | (μg) | % UTC | % UTC | (μg) |
| 1429226 | 1 | 100 | 106 | 14 | 100 | 96 | 21 |
| | 3 | 109 | 106 | | 123 | 75 | |
| | 10 | 95 | 38 | | 109 | 69 | |
| | 30 | 106 | 38 | | 162 | 43 | |
| | 100 | 105 | 17 | | 164 | 11 | |
| | 300 | 104 | 7 | | 162 | 2 | |
| | 700 | 117 | 7 | | 172 | 1 | |

### Example 7: Tolerability of Modified Oligonucleotides Complementary to SCN1A in Wild-Type Mice

[0303] Compound No. 1429226 and comparator compound 1367010, both described hereinabove, were tested in wild-type female C57/B16 mice to assess the tolerability of the oligonucleotides. Wild-type female C57/B16 mice each received a single ICV dose of either 500 μg or 700 μg of modified oligonucleotide, indicated as Dose (μg) in the tables below. Each treatment group consisted of 4 mice. A group of 4 mice received PBS as a negative control for each experiment (identified in separate tables below). At 3 hours post-injection, mice were evaluated according to seven different criteria. The criteria are (1) the mouse was bright, alert, and responsive; (2) the mouse was standing or hunched without stimuli; (3) the mouse showed any movement without stimuli; (4) the mouse demonstrated forward movement after it was lifted; (5) the mouse demonstrated any movement after it was lifted; (6) the mouse responded to tail pinching; (7) regular breathing. For each of the 7 criteria, a mouse was given a subscore of 0 if it met the criteria and 1 if it did not (the functional observational battery score or FOB). After all 7 criteria were evaluated, the scores were summed for each mouse and averaged within each treatment group. Each of Tables 20-22 represents a different experiment.

[0304] As shown in the tables below, Compound No. 1429226 is more tolerable than comparator compound 1367010 in this assay.

TABLE 20
Tolerability scores in mice

| Compound | Dose | FOB 3 |
|---|---|---|
| No. | (μg) | hour |
| PBS | N/A | 0 |
| 1367010 | 500 | 5.75 |

TABLE 21
Tolerability scores in mice

| Compound | Dose | FOB 3 |
|---|---|---|
| No. | (μg) | hour |
| PBS | N/A | 0 |
| 1367010 | 700 | 7 |

TABLE 22
Tolerability scores in mice

| Compound | Dose | FOB 3 |
|---|---|---|
| No. | (μg) | hour |
| PBS | N/A | 0 |
| 1429226 | 500 | 4 |
| 1429226 | 700 | 4 |

### Example 8: Design of Modified Oligonucleotides Complementary to a Human SCN1A Nucleic Acid

[0305] Modified oligonucleotides complementary to a human SCN1A nucleic acid are designed and synthesized as indicated in Table 23 below.

[0306] The modified oligonucleotides in Table 23 are 18, 19, or 20 nucleosides in length, as specified. The modified oligonucleotides comprise 2′-MOE sugar moieties, as specified. The sugar motif for each modified oligonucleotide is provided in the Sugar Motif column, wherein each ‘e’ represents a 2′-MOE sugar moiety. The intemucleoside linkage motif for each modified oligonucleotide is provided in the Internucleoside Linkage Motif column, wherein each ‘s’ represents a phosphorothioate intemucleoside linkage, and each ‘o’ represents a phosphodiester intemucleoside linkage. Each cytosine is a 5-methyl cytosine.

[0307] Each modified oligonucleotide listed in Table 23 below is 100% complementary to SEQ ID NO: 1 (the complement of GENBANK Accession No. NC_000002.12 truncated from nucleotides 165982001 to 166152000), and to SEQ ID NO: 3 (the complement of GENBANK Accession No. NC_000068.7 truncated from nucleotides 66268001 to 66444000) unless specifically stated otherwise. SEQ ID NO:890 is 100% complementary to SEQ ID NO: 3 from Start Site 150105 to Stop Site 150124. SEQ ID NO:891 is 100% complementary to SEQ ID NO: 3 from Start Site 150105 to Stop Site 150123. SEQ ID NO:892 is 100% complementary to SEQ ID NO: 3 from Start Site 150106 to Stop Site 150124. “Start site” indicates the 5′-most nucleoside to which the modified oligonucleotide is complementary in the target nucleic acid sequence. “Stop site” indicates the 3′-most nucleoside to which the modified oligonucleotide is complementary in the target nucleic acid sequence.

TABLE 23
2′-MOE modified oligonucleotides with mixed PS/PO internucleoside linkages

| | | | | SEQ | SEQ | |
|---|---|---|---|---|---|---|
| | Nucleobase | | Internucleoside | ID No: | ID No: | SEQ |
| Compound | Sequence | Sugar Motif | Linkage Motif | 1 Start | 1 Stop | ID |
| Number | (5′ to 3′) | (5′ to 3′) | (5′ to 3′) | Site | Site | No. |
| 1472459 | AGTTGGAGCAAGATTATC | eeeeeeeeeeeeeeeeee | soossssssssssssss | 144708 | 144725 | 41 |
| 1472453 | AGTTGGAGCAAGATTATC | eeeeeeeeeeeeeeeeee | sososssssssssssss | 144708 | 144725 | 41 |
| 1472454 | AGTTGGAGCAAGATTATC | eeeeeeeeeeeeeeeeee | sosssosssssssssss | 144708 | 144725 | 41 |
| 1472455 | AGTTGGAGCAAGATTATC | eeeeeeeeeeeeeeeeee | sosssssosssssssss | 144708 | 144725 | 41 |
| 1472460 | AGTTGGAGCAAGATTATC | eeeeeeeeeeeeeeeeee | sssoossssssssssss | 144708 | 144725 | 41 |
| 1472462 | AGTTGGAGCAAGATTATC | eeeeeeeeeeeeeeeeee | sssssssoossssssss | 144708 | 144725 | 41 |
| 1472463 | AGTTGGAGCAAGATTATC | eeeeeeeeeeeeeeeeee | sssssssssoossssss | 144708 | 144725 | 41 |
| 1472464 | AGTTGGAGCAAGATTATC | eeeeeeeeeeeeeeeeee | sssssssssssoossss | 144708 | 144725 | 41 |
| 1472456 | AGTTGGAGCAAGATTATC | eeeeeeeeeeeeeeeeee | sosssssssosssssss | 144708 | 144725 | 41 |
| 1472457 | AGTTGGAGCAAGATTATC | eeeeeeeeeeeeeeeeee | sosssssssssosssss | 144708 | 144725 | 41 |
| 1472458 | AGTTGGAGCAAGATTATC | eeeeeeeeeeeeeeeeee | sossssssssssssoss | 144708 | 144725 | 41 |
| 1472466 | AGTTGGAGCAAGATTATC | eeeeeeeeeeeeeeeeee | ssosssssssssssoss | 144708 | 144725 | 41 |
| 1472467 | AGTTGGAGCAAGATTATC | eeeeeeeeeeeeeeeeee | ssssosssssssssoss | 144708 | 144725 | 41 |
| 1472461 | AGTTGGAGCAAGATTATC | eeeeeeeeeeeeeeeeee | sssssoossssssssss | 144708 | 144725 | 41 |
| 1472468 | AGTTGGAGCAAGATTATC | eeeeeeeeeeeeeeeeee | ssssssosssssssoss | 144708 | 144725 | 41 |
| 1472472 | AGTTGGAGCAAGATTATC | eeeeeeeeeeeeeeeeee | ssssssssossssosss | 144708 | 144725 | 41 |
| 1472469 | AGTTGGAGCAAGATTATC | eeeeeeeeeeeeeeeeee | ssssssssosssssoss | 144708 | 144725 | 41 |
| 1472470 | AGTTGGAGCAAGATTATC | eeeeeeeeeeeeeeeeee | ssssssssssosssoss | 144708 | 144725 | 41 |
| 1472473 | AGTTGGAGCAAGATTATC | eeeeeeeeeeeeeeeeee | sssssssssssososss | 144708 | 144725 | 41 |
| 1472471 | AGTTGGAGCAAGATTATC | eeeeeeeeeeeeeeeeee | ssssssssssssososs | 144708 | 144725 | 41 |
| 1472465 | AGTTGGAGCAAGATTATC | eeeeeeeeeeeeeeeeee | sssssssssssssooss | 144708 | 144725 | 41 |
| 1472452 | AAGTTGGAGCAAGATTAT | eeeeeeeeeeeeeeeeeeee | ossssssssssssssssso | 144707 | 144726 | 890 |
| | CC | | | | | |
| 1472451 | AGTTGGAGCAAGATTATC | eeeeeeeeeeeeeeeeeee | ssssssssssssssssso | 144707 | 144725 | 891 |
| | C | | | | | |
| 1472450 | AAGTTGGAGCAAGATTAT | eeeeeeeeeeeeeeeeeee | osssssssssssssssss | 144708 | 144726 | 892 |
| | C | | | | | |

### Example 9: Activity and Tolerability of Modified Oligonucleotides Complementary to Human SCN1A in Wild-Type Mice

### Treatment

[0308] Modified oligonucleotides described in Table 23 were tested in wild-type female C57/B16 mice to assess the tolerability and activity of the oligonucleotides. Wild-type female C57/B16 mice each received a single ICV dose of 700 μg of modified oligonucleotide as listed in the table below. Each treatment group consisted of 3 mice. A group of 4 mice received PBS as a negative control.

### Activity

[0309] Eight weeks post treatment mice were sacrificed and RNA was extracted from cortical brain tissue for quantitative real-time RTPCR analysis of SCN1A RNA using primer probe set RTS48951 (described herein above) to measure the amount of SCN1A RNA that excludes the mouse form of NIE-1 (NIE-1⁻) and primer probe set RTS48949 (described herein above) to measure the amount of SCN1A RNA that includes the mouse form of NIE-1 (NIE-1⁺). SCN1A RNA is presented as % of the average of the PBS control (% control), normalized to mouse GAPDH. Mouse GAPDH was amplified using primer probe set mGapdh_LTS00102 (described herein above). As shown in Table 24 below, the compounds demonstrate activity in this assay.

TABLE 24
Effect of modified oligonucleotides on amount of mouse SCN1A excluding
NIE-1 (NIE-1⁻) and the amountof mouse SCN1A RNA including (NIE-1⁺)
in wildtype mice, single dose

| | CORTEX | |
|---|---|---|
| | NIE-1⁻ | NIE-1⁺ |
| Compound No. | % control | % control |
| PBS | 100 | 100 |
| 1472450 | 154 | 8 |
| 1472451 | 169 | 3 |
| 1472452 | 171 | 9 |
| 1472453 | 158 | 2 |
| 1472454 | 139 | 8 |
| 1472455 | 156 | 4 |
| 1472456 | 170 | 4 |
| 1472457 | 178 | 2 |
| 1472458 | 197 | 4 |
| 1472459 | 199 | 12 |
| 1472460 | 178 | 2 |
| 1472461 | 185 | 5 |
| 1472462 | 192 | 6 |
| 1472463 | 197 | 4 |
| 1472464 | 198 | 2 |
| 1472465 | 175 | 4 |
| 1472466 | 162 | 1 |
| 1472467 | 169 | 4 |
| 1472468 | 169 | 2 |
| 1472469 | 148 | 4 |
| 1472470 | 145 | 4 |
| 1472471 | 150 | 3 |
| 1472472 | 150 | 4 |
| 1472473 | 152 | 1 |

### Tolerability

[0310] At 3 hours post-injection, mice were evaluated according to seven different criteria. The criteria are (1) the mouse was bright, alert, and responsive; (2) the mouse was standing or hunched without stimuli; (3) the mouse showed any movement without stimuli; (4) the mouse demonstrated forward movement after it was lifted; (5) the mouse demonstrated any movement after it was lifted; (6) the mouse responded to tail pinching; (7) regular breathing. For each of the 7 criteria, a mouse was given a subscore of 0 if it met the criteria and 1 if it did not (the functional observational battery score or FOB). After all 7 criteria were evaluated, the scores were summed for each mouse and averaged within each treatment group. As shown in the data provided in Table 21 above, and Table 25 below, the compounds described in Table 23 are more tolerable than comparator compound 1367010 in this assay.

TABLE 25
Tolerability scores in mice

| Compound | FOB 3 |
|---|---|
| No. | hour |
| PBS | 0 |
| 1472450 | 3.33 |
| 1472451 | 3.00 |
| 1472452 | 2.33 |
| 1472453 | 1.00 |
| 1472454 | 2.33 |
| 1472455 | 1.33 |
| 1472456 | 1.00 |
| 1472457 | 2.67 |
| 1472458 | 1.33 |
| 1472459 | 1.67 |
| 1472460 | 1.67 |
| 1472461 | 2.00 |
| 1472462 | 2.67 |
| 1472463 | 2.67 |
| 1472464 | 2.00 |
| 1472465 | 3.67 |
| 1472466 | 2.67 |
| 1472467 | 3.67 |
| 1472468 | 3.33 |
| 1472469 | 2.67 |
| 1472470 | 2.67 |
| 1472471 | 3.00 |
| 1472472 | 2.67 |
| 1472473 | 3.33 |

### Example 10: Tolerability of Modified Oligonucleotides Complementary to Human SCN1A in Rats, 3 Hour Study

[0311] Modified oligonucleotides described in Table 23 above, and comparator compound 1367010, were tested in rats to assess the tolerability of the oligonucleotides. Sprague Dawley rats each received a single intrathecal (IT) dose of 3 mg of oligonucleotide listed in the table below. Each treatment group consisted of 4 rats. A group of 4 rats received PBS as a negative control. At 3 hours post-injection, movement in 7 different parts of the body were evaluated for each rat. The 7 body parts are (1) the rat's tail; (2) the rat's posterior posture; (3) the rat's hind limbs; (4) the rat's hind paws; (5) the rat's forepaws; (6) the rat's anterior posture; (7) the rat's head. For each of the 7 different body parts, each rat was given a sub-score of 0 if the body part was moving or 1 if the body part was paralyzed (the functional observational battery score or FOB). After each of the 7 body parts were evaluated, the sub-scores were summed for each rat and then averaged for each group. For example, if a rat's tail, head, and all other evaluated body parts were moving 3 hours after the 3 mg IT dose, it would get a summed score of 0. If another rat was not moving its tail 3 hours after the 3 mg IT dose but all other evaluated body parts were moving, it would receive a score of 1. Results are presented as the average score for each treatment group.

TABLE 26
Tolerability scores in rats (n = 4) at 3 mg dose

| Compound | 3 hr. |
|---|---|
| No. | FOB |
| PBS | 0.00 |
| 1367010 | 6.00 |

TABLE 27
Tolerability scores in rats (n = 4) at 3 mg dose

| Compound | 3 hr. |
|---|---|
| No. | FOB |
| PBS | 0.00 |
| 1472450 | 1.00 |
| 1472451 | 2.00 |
| 1472452 | 2.75 |
| 1472453 | 2.25 |
| 1472454 | 3.00 |
| 1472455 | 1.50 |
| 1472456 | 2.25 |
| 1472457 | 2.25 |
| 1472458 | 3.00 |
| 1472459 | 2.25 |
| 1472460 | 2.75 |
| 1472461 | 2.25 |
| 1472462 | 2.25 |
| 1472463 | 1.50 |
| 1472464 | 1.25 |
| 1472465 | 2.25 |
| 1472466 | 3.00 |
| 1472467 | 2.25 |
| 1472468 | 4.00 |
| 1472469 | 1.75 |
| 1472470 | 3.00 |
| 1472471 | 2.25 |
| 1472472 | 2.25 |
| 1472473 | 0.00 |

### Example 11: Tolerability of Modified Oligonucleotides Complementary to Human SCN1A in Rats, Long-Term Assessment

[0312] In separate studies run under the same conditions, modified oligonucleotides described in Table 23 and comparator compound 1367010 were tested in Sprague Dawley rats to assess long-term tolerability. Sprague Dawley rats each received a single intrathecal (IT) delivered dose of 3 mg of oligonucleotide or PBS. Beginning 1-week post-treatment, each animal was weighed and evaluated weekly by a trained observer for adverse events. Adverse events are defined as neurological dysfunction not typical in PBS-treated control animals, including, but not limited to: abnormal limb splay, abnormal gait, tremors, abnormal respiration, paralysis, and spasticity. The onset of the adverse event is defined as the week post-dosing when the dysfunction was first recorded. If no adverse event was achieved, there is no onset (−). If the animal died prior to 1-week due to acute toxicity, long term adverse effects could not be verified, and such cases are marked with a ‘Ø’ symbol. Similar tolerability assessments are described in Ostergaard et al., Nucleic Acids Res., 2013 Nov, 41(21), 9634-9650 and Southwell et al., Mol Ther., 2014 Dec, 22(12), 2093-2106.

[0313] At the end of the study, the rats are sacrificed and tissues were collected. Histopathology was performed on sections of cerebellum using calbindin stain. The calbindin stained cerebellum sections were evaluated for Purkinje cell loss. Purkinje cell loss was observed in calbindin stained cerebellum sections as indicated in the table below. Cerebellum and spinal cord were also evaluated using an antibody specific for modified oligonucleotides. Animals demonstrating no oligonucleotide uptake were excluded from histopathology analysis. Histology was not completed for animals that were sacrificed early due to adverse events. In cases where purkinje cell loss could not be evaluated due to death of mice in less than a week post treatment, the values are indicated as ‘N/A’. Additionally, cortical GFAP, a marker of astrogliosis (Abdelhak, et al., Scientific Reports, 2018, 8, 14798), was measured using RT-PCR, and average elevations >2-fold are noted below. In cases where GFAP levels could not be evaluated due to death of mice in less than a week post treatment, the values are indicated as ‘N/A’.

TABLE 28
Long-term tolerability in rats at 3 mg dose

| | Adverse | Purkinje | |
|---|---|---|---|
| | event | cell loss | |
| | onset, | (# | Cortex |
| | weeks | animals | GFAP |
| | post- | with | mRNA |
| | treatment, | loss/# | >2-fold |
| Compound | individual | animals | PBS |
| Number | animals | tested) | Control |
| PBS | -, -, -, - | 0/4 | 100 |
| 1367010 | θ, θ, θ, θ | N/A | N/A |
| 1472450 | -, -, -, - | 0/4 | 151 |
| 1472451 | -, 7, -, - | 2/4 | 128 |
| 1472452 | -, -, 7, - | 0/4 | 112 |
| 1472453 | -, -, -, - | 1/4 | 100 |
| 1472454 | -, -, -, - | 0/4 | 136 |
| 1472455 | -, -, -, - | 0/4 | 116 |
| 1472456 | -, -, -, 7 | 0/4 | 140 |
| 1472457 | -, -, -, - | 0/4 | 135 |
| 1472458 | -, -, -, 3 | 0/4 | 118 |
| 1472459 | -, -, -, - | 0/4 | 129 |
| 1472460 | -, -, -, - | 1/4 | 130 |
| 1472461 | -, -, -, - | 0/4 | 130 |
| 1472462 | -, -, -, - | 0/4 | 130 |
| 1472463 | -, -, -, - | 0/4 | 118 |
| 1472464 | -, -, -, - | 0/4 | 111 |
| 1472465 | -, -, -, - | 0/4 | 119 |
| 1472466 | 7, -, 7, 7 | 1/4 | 159 |
| 1472467 | -, -, -, - | 0/4 | 120 |
| 1472468 | -, -, - | 0/3 | 148 |
| 1472469 | -, -, -, - | 0/4 | 123 |
| 1472470 | -, -, -, - | 0/4 | 150 |
| 1472471 | -, -, -, - | 0/4 | 142 |
| 1472472 | -, -, -, - | 0/4 | 125 |
| 1472473 | -, -, -, - | 0/4 | 115 |

### Example 12: Design of Modified Oligonucleotides Complementary to a Human SCN1A Nucleic Acid

[0314] Modified oligonucleotides complementary to a human SCN1A nucleic acid were designed and synthesized as indicated in Table 29 below.

[0315] The modified oligonucleotides in Table 29 are 18 nucleosides in length. Each nucleoside comprises a 2′-NMA sugar moiety. The internucleoside linkages throughout each modified oligonucleotide are phosphorothioate internucleoside linkages. All cytosine nucleobases throughout each modified oligonucleotide are 5-methylcytosines.

[0316] Each modified oligonucleotide listed in Table 29 below is 100% complementary to SEQ ID NO: 1 (the complement of GENBANK Accession No. NC_000002.12 truncated from nucleotides 165982001 to 166152000). “Start site” indicates the 5′-most nucleoside to which the modified oligonucleotide is complementary in the target nucleic acid sequence. “Stop site” indicates the 3′-most nucleoside to which the modified oligonucleotide is complementary in the target nucleic acid sequence.

TABLE 29
2′-NMA modified oligonucleotides with uniform
phosphorothioate internucleoside linkages

| | | SEQ | SEQ | |
|---|---|---|---|---|
| | | ID No: | ID No: | SEQ |
| Compound | Nucleobase Sequence | 1 Start | 1 Stop | ID |
| Number | (5′ to 3′) | Site | Site | No. |
| 1521407 | GGTAGCAAAAGGGGTAAT | 144779 | 144796 | 881 |
| 1521408 | AGCAAAAGGGGTAATACA | 144776 | 144793 | 885 |
| 1521409 | GCAAAAGGGGTAATACAG | 144775 | 144792 | 888 |
| 1521410 | CAAAAGGGGTAATACAGT | 144774 | 144791 | 882 |
| 1521411 | AAAGGGGTAATACAGTAC | 144772 | 144789 | 880 |
| 1521412 | AAGGGGTAATACAGTACC | 144771 | 144788 | 883 |
| 1521413 | GTAATACAGTACCCATAA | 144766 | 144783 | 511 |
| 1521414 | TAATACAGTACCCATAAT | 144765 | 144782 | 750 |
| 1521415 | AATACAGTACCCATAATA | 144764 | 144781 | 736 |
| 1521416 | ATACAGTACCCATAATAA | 144763 | 144780 | 642 |
| 1521417 | TACAGTACCCATAATAAA | 144762 | 144779 | 519 |
| 1521418 | ACAGTACCCATAATAAAG | 144761 | 144778 | 741 |
| 1521419 | CCCATCCAAGTTGGAGCA | 144716 | 144733 | 664 |
| 1521420 | CCATCCAAGTTGGAGCAA | 144715 | 144732 | 645 |
| 1521421 | CATCCAAGTTGGAGCAAG | 144714 | 144731 | 550 |
| 1521422 | ATCCAAGTTGGAGCAAGA | 144713 | 144730 | 814 |
| 1521423 | TCCAAGTTGGAGCAAGAT | 144712 | 144729 | 692 |
| 1521424 | CCAAGTTGGAGCAAGATT | 144711 | 144728 | 587 |
| 1521425 | CAAGTTGGAGCAAGATTA | 144710 | 144727 | 523 |
| 1521426 | AAGTTGGAGCAAGATTAT | 144709 | 144726 | 778 |
| 1521428 | TTGGAGCAAGATTATCCT | 144706 | 144723 | 510 |
| 1521429 | TGGAGCAAGATTATCCTA | 144705 | 144722 | 816 |
| 1521430 | GGAGCAAGATTATCCTAT | 144704 | 144721 | 696 |
| 1521431 | GAGCAAGATTATCCTATA | 144703 | 144720 | 590 |

### Example 13: Activity of Modified Oligonucleotides Targeting SCN1A in Wildtype Mice

[0317] Wildtype C571BL/6 mice were divided into groups of 3 mice each. Each mouse received a single ICV bolus of 50 μg of modified oligonucleotide. A group of 4 mice received PBS as a negative control.

[0318] Compound No. 1367010, previously described in WO 2019/040923 and herein above, was added as a comparator compound.

[0319] Two weeks post treatment mice were sacrificed and RNA was extracted from cortical brain tissue for real-time qPCR analysis of SCN1A RNA using primer probe set RTS48951 (described herein above) to measure the amount of SCN1A RNA that excludes the mouse form of NIE-1 (NIE-1⁻) and primer probe set RTS48869 (forward sequence GCTCAAGCTCATCTCGCT, designated herein as SEQ ID NO: 27; reverse sequence AGCTCCGCAAGAAACATCC, designated herein as SEQ ID NO: 28: probe sequence TTCGATTTTGTGGTGGTCATCCTCTCC, designated herein as SEQ ID NO; 29) to measure the total amount of SCN1A mRNA transcript. SCN1A RNA is presented as % o of the average of the PBS control (% control), normalized to mouse GAPDH. Mouse GAPDH was amplified using primer probe set mGapdh_LTS00102 (described herein above).

TABLE 30
Effect of modified oligonucleotides on the amount of mouse SCN1A
excluding NIE-1 (NIE-1⁻) and the amount of total mouse SCN1A mRNA
in wildtype mice, single dose

| | CORTEX | |
|---|---|---|
| | | Total |
| | | SCN1A |
| Compound No. | NIE-1⁻ | mRNA |
| PBS | 100 | 100 |
| 1367010 | 120 | 126 |
| 1429226 | 142 | 142 |
| 1521407 | 129 | 130 |
| 1521408 | 131 | 121 |
| 1521409 | 126 | 112 |
| 1521410 | 135 | 118 |
| 1521411 | 125 | 11 |
| 1521412 | 123 | 117 |
| 1521413 | 117 | 116 |
| 1521414 | 103 | 114 |
| 1521415 | 143 | 132 |
| 1521416 | 113 | 111 |
| 1521417 | 106 | 104 |
| 1521418 | 110 | 105 |
| 1521419 | 125 | 128 |
| 1521420 | 114 | 119 |
| 1521421 | 134 | 127 |
| 1521422 | 116 | 112 |
| 1521423 | 132 | 122 |
| 1521424 | 120 | 117 |
| 1521425 | 128 | 136 |
| 1521426 | 119 | 126 |
| 1521428 | 119 | 121 |
| 1521429 | 129 | 120 |
| 1521430 | 117 | 116 |
| 1521431 | 111 | 116 |

1. An oligomeric compound comprising a modified oligonucleotide consisting of 12 to 30 linked nucleosides wherein the nucleobase sequence of the modified oligonucleotide is at least 85% complementary to an equal length portion of a SCN1A nucleic acid, and wherein the modified oligonucleotide comprises at least one modification selected from a modified sugar moiety and a modified internucleoside linkage.

2. An oligomeric compound comprising a modified oligonucleotide consisting of 12 to 30 linked nucleosides and having a nucleobase sequence comprising at least 12, at least 13, at least 14, at least 15, at least 16, at least 17, or 18 contiguous nucleobases of any of the nucleobase sequences of SEQ ID NOs 41-889, wherein the modified oligonucleotide comprises at least one modification selected from a modified sugar moiety and a modified intemucleoside linkage.

3. The oligomeric compound of claim 1 or claim 2, wherein the modified oligonucleotide has a nucleobase sequence that is at least 90%, 95%, or 100% complementary to the nucleobase sequence of SEQ ID NO: 1 or SEQ ID NO: 2 when measured across the entire nucleobase sequence of the modified oligonucleotide.

4. The oligomeric compound of any of claims 1-3, wherein the modified oligonucleotide has a nucleobase sequence comprising a portion of at least 8, at least 9, at least 10, at least 11, at least 12, at least 13, at least 14, at least 15, at least 16, at least 17, or at least 18 contiguous nucleobases, wherein the portion is complementary to SEQ ID NO: 13.

5. The oligomeric compound of any of claims 1-4 wherein the modified oligonucleotide comprises at least one modified sugar moiety.

6. The oligomeric compound of claim 5, wherein the modified oligonucleotide comprises at least one bicyclic sugar moiety.

7. The oligomeric compound of claim 6, wherein the bicyclic sugar moiety has a 4′-2′ bridge, wherein the 4′-2′ bridge is selected from —CH₂—O—; and —CH(CH₃)—O—.

8. The oligomeric compound of any of claims 5-7, wherein the modified oligonucleotide comprises at least one non-bicyclic modified sugar moiety.

9. The oligomeric compound of claim 8, wherein the non-bicyclic modified sugar moiety is any of a 2′-MOE sugar moiety, a 2′-NMA sugar moiety, a 2′-OMe sugar moiety, or a 2′-F sugar moiety.

10. The oligomeric compound any of claims 5-9, wherein the modified oligonucleotide comprises at least one sugar surrogate.

11. The oligomeric compound of claim 10, wherein the sugar surrogate is any of morpholino, modified morpholino, PNA, THP, and F-HNA.

12. The oligomeric compound of claim 5, wherein each nucleoside of the modified oligonucleotide comprises a modified sugar moiety.

13. The oligomeric compound of claim 12, wherein each modified sugar moiety is a 2′-MOE sugar moiety.

14. The oligomeric compound of claim 12, wherein each modified sugar moiety is a 2′-NMA sugar moiety.

15. The oligomeric compound of any of claims 1-14, wherein the modified oligonucleotide comprises at least one modified intemucleoside linkage.

16. The oligomeric compound of any of claims 1-14, wherein each intemucleoside linkage of the modified oligonucleotide is a modified intemucleoside linkage.

17. The oligomeric compound of claim 15 or claim 16, wherein at least one modified intemucleoside linkage is a phosphorothioate intemucleoside linkage.

18. The oligomeric compound of claim 15 or claim 17 wherein the modified oligonucleotide comprises at least one phosphodiester intemucleoside linkage.

19. The oligomeric compound of any of claims 15, 17, or 18, wherein each intemucleoside linkage is independently selected from a phosphodiester intemucleoside linkage and a phosphorothioate intemucleoside linkage.

20. The oligomeric compound of claim 16, wherein each intemucleoside linkage is a phosphorothioate internucleoside linkage.

21. The oligomeric compound of any of claims 1-20, wherein the modified oligonucleotide comprises at least one modified nucleobase.

22. The oligomeric compound of claim 21, wherein the modified nucleobase is a 5-methyl cytosine.

23. The oligomeric compound of any of claims 1-22, wherein the modified oligonucleotide consists of 12-22, 12-20, 14-20, 15-25, 16-20, 18-22 or 18-20 linked nucleosides.

24. The oligomeric compound of any of claims 1-23, wherein the modified oligonucleotide consists of 16, 17, or 18 linked nucleosides.

25. An oligomeric compound comprising a modified oligonucleotide according to the following chemical notation: Aₙₛ Gₙₛ Tₙₛ Tₙₛ Tₙₛ Gₙₛ Aₙₛ Gₙₛ ^{m}Cₙₛ Aₙₛ Aₙₛ Gₙₛ Aₙₛ Tₙₛ Tₙₛ Aₙₛ Tₙₛ ^{m}Cₙ (SEQ ID NO: 41), wherein,
A=an adenine nucleobase,
^{m}C=a 5-methyl cytosine nucleobase,
G=a guanine nucleobase,
T=a thymine nucleobase,
n=a 2′-NMA sugar moiety, and
s=a phosphorothioate internucleoside linkage.

26. An oligomeric compound comprising a modified oligonucleotide according to any one of the following chemical notations (5′ to 3′):
i)
(SEQ ID NO: 41)
AₑₛGₑₒTₑₒTₑₛGₑₛGₑₛAₑₛGₑₛ^{m}CₑₛAₑₛAₑₛGₑₛAₑₛTₑₛTₑₛAₑₛTₑₛ^{m}Cₑ;
ii)
(SEQ ID NO: 41)
AₑₛGₑₒTₑₛTₑₒGₑₛGₑₛAₑₛGₑₛ^{m}CₑₛAₑₛAₑₛGₑₛAₑₛTₑₛTₑₛAₑₛTₑₛ^{m}Cₑ;
iii)
(SEQ ID NO: 41)
AₑₛGₑₒTₑₛTₑₛGₑₛGₑₒAₑₛGₑₛ^{m}CₑₛAₑₛAₑₛGₑₛAₑₛTₑₛTₑₛAₑₛTₑₛ^{m}Cₑ;
iv)
(SEQ ID NO: 41)
AₑₛGₑₒTₑₛTₑₛGₑₛGₑₛAₑₛGₑₒ^{m}CₑₛAₑₛAₑₛGₑₛAₑₛTₑₛTₑₛAₑₛTₑₛ^{m}Cₑ;
v)
(SEQ ID NO: 41)
AₑₛGₑₛTₑₛTₑₒGₑₒGₑₛAₑₛGₑₛ^{m}CₑₛAₑₛAₑₛGₑₛAₑₛTₑₛTₑₛAₑₛTₑₛ^{m}Cₑ;
vi)
(SEQ ID NO: 41)
AₑₛGₑₛTₑₛTₑₛGₑₛGₑₛAₑₛGₑₒ^{m}CₑₒAₑₛAₑₛGₑₛAₑₛTₑₛTₑₛAₑₛTₑₛ^{m}Cₑ;
vii)
(SEQ ID NO: 41)
AₑₛGₑₛTₑₛTₑₛGₑₛGₑₛAₑₛGₑₛ^{m}CₑₛAₑₒAₑₒGₑₛAₑₛTₑₛTₑₛAₑₛTₑₛ^{m}Cₑ;
viii)
(SEQ ID NO: 41)
AₑₛGₑₛTₑₛTₑₛGₑₛGₑₛAₑₛGₑₛ^{m}CₑₛAₑₛAₑₛGₑₒAₑₒTₑₛTₑₛAₑₛTₑₛ^{m}Cₑ;
ix)
(SEQ ID NO: 41)
AₑₛGₑₒTₑₛTₑₛGₑₛGₑₛAₑₛGₑₛ^{m}CₑₛAₑₒAₑₛGₑₛAₑₛTₑₛTₑₛAₑₛTₑₛ^{m}Cₑ;
x)
(SEQ ID NO: 41)
AₑₛGₑₒTₑₛTₑₛGₑₛGₑₛAₑₛGₑₛ^{m}CₑₛAₑₛAₑₛGₑₒAₑₛTₑₛTₑₛAₑₛTₑₛ^{m}Cₑ;
xi)
(SEQ ID NO: 41)
AₑₛGₑₒTₑₛTₑₛGₑₛGₑₛAₑₛGₑₛ^{m}CₑₛAₑₛAₑₛGₑₛAₑₛTₑₛTₑₒAₑₛTₑₛ^{m}Cₑ;
xii)
(SEQ ID NO: 41)
AₑₛGₑₛTₑₒTₑₛGₑₛGₑₛAₑₛGₑₛ^{m}CₑₛAₑₛAₑₛGₑₛAₑₛTₑₛTₑₒAₑₛTₑₛ^{m}Cₑ;
xiii)
(SEQ ID NO: 41)
AₑₛGₑₛTₑₛTₑₛGₑₒGₑₛAₑₛGₑₛ^{m}CₑₛAₑₛAₑₛGₑₛAₑₛTₑₛTₑₒAₑₛTₑₛ^{m}Cₑ;
xiv)
(SEQ ID NO: 41)
AₑₛGₑₛTₑₛTₑₛGₑₛGₑₒAₑₒGₑₛ^{m}CₑₛAₑₛAₑₛGₑₛAₑₛTₑₛTₑₛAₑₛTₑₛ^{m}Cₑ;
xv)
(SEQ ID NO: 41)
AₑₛGₑₛTₑₛTₑₛGₑₛGₑₛAₑₒGₑₛ^{m}CₑₛAₑₛAₑₛGₑₛAₑₛTₑₛTₑₒAₑₛTₑₛ^{m}Cₑ;
xvi)
(SEQ ID NO: 41)
AₑₛGₑₛTₑₛT_{eS}GₑₛGₑₛA_{eS}Gₑₛ^{m}CₑₒAₑₛAₑₛGₑₛAₑₛTₑₒTₑₛAₑₛTₑₛ^{m}Cₑ;
xvii)
(SEQ ID NO: 41)
AₑₛGₑₛTₑₛTₑₛGₑₛGₑₛAₑₛGₑₛ^{m}CₑₒAₑₛAₑₛGₑₛAₑₛTₑₛTₑₒAₑₛTₑₛ^{m}Cₑ;
xviii)
(SEQ ID NO: 41)
AₑₛGₑₛTₑₛTₑₛGₑₛGₑₛAₑₛGₑₛ^{m}CₑₛAₑₛAₑₒGₑₛAₑₛTₑₛTₑₒAₑₒTₑₛ^{m}Cₑ;
xix)
(SEQ ID NO: 41)
AₑₛGₑₛTₑₛTₑₛGₑₛGₑₛAₑₛGₑₛ^{m}CₑₛAₑₛAₑₛGₑₒAₑₛTₑₒTₑₛAₑₛTₑₛ^{m}Cₑ;
xx)
(SEQ ID NO: 41)
AₑₛGₑₛTₑₛTₑₛGₑₛGₑₛAₑₛGₑₛ^{m}CₑₛAₑₛAₑₛGₑₛAₑₒTₑₛTₑₒAₑₛTₑₛ^{m}Cₑ;
xxi)
(SEQ ID NO: 41)
AₑₛGₑₛTₑₛTₑₛGₑₛGₑₛAₑₛGₑₛ^{m}CₑₛAₑₛAₑₛGₑₛAₑₛTₑₒTₑₒAₑₛTₑₛ^{m}Cₑ;
xxii)
(SEQ ID NO: 890)
AₑₒAₑₛGₑₛTₑₛTₑₛGₑₛGₑₛAₑₛGₑₛ^{m}CₑₛAₑₛAₑₛGₑₛAₑₛTₑₛTₑₛAₑₛTₑₛ^{m}Cₑₒ^{m}Cₑ;
xxiii)
(SEQ ID NO: 891)
AₑₛGₑₛTₑₛTₑₛGₑₛGₑₛAₑₛGₑₛ^{m}CₑₛAₑₛAₑₛGₑₛAₑₛTₑₛTₑₛAₑₛTₑₛmCₑₒ^{m}Cₑ;
xxiv)
(SEQ ID NO: 892)
AₑₒAₑₛGₑₛTₑₛTₑₛGₑₛGₑₛAₑₛGₑₛ^{m}CₑₛAₑₛAₑₛGₑₛAₑₛTₑₛTₑₛAₑₛTₑₛ^{m}Cₑ;
xxv)
(SEQ ID NO: 881)
GₙₛGₙₛTₙₛAₙₛGₙₛ^{m}CₙₛAₙₛAₙₛAₙₛAₙₛGₙₛGₙₛGₙₛGₙₛTₙₛAₙₛAₙₛTₙ;
xxvi)
(SEQ ID NO: 885)
AₙₛGₙₛ^{m}CₙₛAₙₛAₙₛAₙₛAₙₛGₙₛGₙₛGₙₛGₙₛTₙₛAₙₛAₙₛTₙₛAₙₛmCₙₛAₙ;
xxvii)
(SEQ ID NO: 888)
Gₙₛ^{m}CₙₛAₙₛAₙₛAₙₛAₙₛGₙₛGₙₛGₙₛGₙₛTₙₛAₙₛAₙₛTₙₛAₙₛ^{m}C_{nS}AₙₛGₙ;
xxviii)
(SEQ ID NO: 882)
^{m}CₙₛAₙₛAₙₛAₙₛAₙₛGₙₛGₙₛGₙₛGₙₛTₙₛAₙₛAₙₛTₙₛAₙₛ^{m}CₙₛAₙₛGₙₛTₙ;
xxix)
(SEQ ID NO: 880)
AₙₛAₙₛAₙₛGₙₛGₙₛGₙₛGₙₛTₙₛAₙₛAₙₛTₙₛAₙₛ^{m}CₙₛAₙₛGₙₛTₙₛAₙₛ^{m}Cₙ;
xxx)
(SEQ ID NO: 883)
AₙₛAₙₛGₙₛGₙₛGₙₛGₙₛTₙₛAₙₛAₙₛTₙₛAₙₛ^{m}CₙₛAₙₛGₙₛTₙₛAₙₛ^{m}Cₙₛ^{m}Cₙ;
xxxi)
(SEQ ID NO: 511)
GₙₛTₙₛAₙₛAₙₛTₙₛAₙₛ^{m}CₙₛAₙₛGₙₛTₙₛAₙₛ^{m}Cₙₛ^{m}Cₙₛ^{m}CₙₛAₙₛTₙₛAₙₛAₙ;
xxxii)
(SEQ ID NO: 750)
TₙₛAₙₛAₙₛTₙₛAₙₛ^{m}CₙₛAₙₛGₙₛTₙₛAₙₛ^{m}Cₙₛ^{m}Cₙₛ^{m}CₙₛAₙₛTₙₛAₙₛAₙₛTₙ;
xxxiii)
(SEQ ID NO: 736)
AₙₛAₙₛTₙₛAₙₛ^{m}CₙₛAₙₛGₙₛTₙₛAₙₛ^{m}Cₙₛ^{m}Cₙₛ^{m}CₙₛAₙₛTₙₛAₙₛAₙₛTₙₛAₙ;
xxxiv)
(SEQ ID NO: 642)
AₙₛTₙₛAₙₛ^{m}CₙₛAₙₛGₙₛTₙₛAₙₛ^{m}Cₙₛ^{m}Cₙₛ^{m}CₙₛAₙₛTₙₛAₙₛAₙₛTₙₛAₙₛAₙ;
xxxv)
(SEQ ID NO: 519)
TₙₛAₙₛ^{m}CₙₛAₙₛGₙₛTₙₛAₙₛ^{m}Cₙₛ^{m}Cₙₛ^{m}CₙₛAₙₛTₙₛAₙₛAₙₛTₙₛAₙₛAₙₛAₙ;
xxxvi)
(SEQ ID NO: 741)
Aₙₛ^{m}CₙₛAₙₛGₙₛTₙₛAₙₛ^{m}Cₙₛ^{m}Cₙₛ^{m}CₙₛAₙₛTₙₛAₙₛAₙₛTₙₛAₙₛAₙₛAₙₛGₙ;
xxxvii)
(SEQ ID NO: 664)
^{m}Cₙₛ^{m}Cₙₛ^{m}CₙₛAₙₛTₙₛ^{m}Cₙₛ^{m}CₙₛAₙₛAₙₛGₙₛTₙₛTₙₛGₙₛGₙₛAₙₛGₙₛ^{m}CₙₛAₙ;
xxxviii)
(SEQ ID NO: 645)
^{m}Cₙₛ^{m}CₙₛAₙₛTₙₛ^{m}CₙₛmCₙₛAₙₛAₙₛGₙₛTₙₛTₙₛGₙₛGₙₛAₙₛGₙₛ^{m}CₙₛAₙₛAₙ;
xxxix)
(SEQ ID NO: 550)
^{m}CₙₛAₙₛTₙₛ^{m}Cₙₛ^{m}CₙₛAₙₛAₙₛGₙₛTₙₛTₙₛGₙₛGₙₛAₙₛGₙₛ^{m}CₙₛAₙₛAₙₛGₙ;
xl)
(SEQ ID NO: 814)
AₙₛTₙₛ^{m}Cₙₛ^{m}CₙₛAₙₛAₙₛGₙₛTₙₛTₙₛGₙₛGₙₛAₙₛGₙₛ^{m}CₙₛAₙₛAₙₛGₙₛAₙ;
xli)
(SEQ ID NO: 692)
Tₙₛ^{m}Cₙₛ^{m}CₙₛAₙₛAₙₛGₙₛTₙₛTₙₛGₙₛGₙₛAₙₛGₙₛ^{m}CₙₛAₙₛAₙₛGₙₛAₙₛTₙ;
xlii)
(SEQ ID NO: 587)
^{m}Cₙₛ^{m}CₙₛAₙₛAₙₛGₙₛTₙₛTₙₛGₙₛGₙₛAₙₛGₙₛ^{m}CₙₛAₙₛAₙₛGₙₛAₙₛTₙₛTₙ;
xliii)
(SEQ ID NO: 523)
^{m}CₙₛAₙₛAₙₛGₙₛTₙₛTₙₛGₙₛGₙₛAₙₛGₙₛ^{m}CₙₛAₙₛAₙₛGₙₛAₙₛTₙₛTₙₛAₙ;
xliv)
(SEQ ID NO: 778)
AₙₛAₙₛGₙₛTₙₛTₙₛGₙₛGₙₛAₙₛGₙₛ^{m}CₙₛAₙₛAₙₛGₙₛAₙₛTₙₛTₙₛAₙₛTₙ;
xlv)
(SEQ ID NO: 510)
TₙₛTₙₛGₙₛGₙₛAₙₛGₙₛ^{m}CₙₛAₙₛAₙₛGₙₛAₙₛTₙₛTₙₛAₙₛTₙₛ^{m}Cₙₛ^{m}CₙₛTₙ;
xlvi)
(SEQ ID NO: 816)
TₙₛGₙₛGₙₛAₙₛGₙₛ^{m}CₙₛAₙₛAₙₛGₙₛAₙₛTₙₛTₙₛAₙₛTₙₛ^{m}Cₙₛ^{m}CₙₛTₙₛAₙ;
xlvii)
(SEQ ID NO: 696)
GₙₛGₙₛAₙₛGₙₛ^{m}CₙₛAₙₛAₙₛGₙₛAₙₛTₙₛTₙₛAₙₛTₙₛ^{m}Cₙₛ^{m}CₙₛTₙₛAₙₛTₙ;
or
xlviii)
(SEQ ID NO: 590)
GₙₛAₙₛG_{nS}^{m}C_{nS}AₙₛAₙₛGₙₛAₙₛTₙₛTₙₛAₙₛTₙₛ^{m}Cₙₛ^{m}C_{nS}TₙₛAₙₛTₙₛAₙ,
wherein,
A=an adenine nucleobase,
^{m}C=a 5-methyl cytosine nucleobase,
G=a guanine nucleobase,
T=a thymine nucleobase,
e=a 2′-MOE sugar moiety,
n=a 2′-NMA sugar moiety,
o=a phosphodiester internucleoside linkage, and
s=a phosphorothioate intemucleoside linkage.

27. The oligomeric compound of any of claims 1-26, wherein the oligomeric compound is a singled-stranded oligomeric compound.

28. The oligomeric compound of any of claims 1-27 consisting of the modified oligonucleotide.

29. The oligomeric compound of any of claims 1-28 comprising a conjugate group comprising a conjugate moiety and a conjugate linker.

30. The oligomeric compound of claim 29, wherein the conjugate group comprises a GalNAc cluster comprising 1-3 GalNAc ligands.

31. The oligomeric compound of claim 29 or claim 30, wherein the conjugate linker consists of a single bond.

32. The oligomeric compound of claim 29, wherein the conjugate linker is cleavable.

33. The oligomeric compound of claim 29, wherein the conjugate linker comprises 1-3 linker-nucleosides.

34. The oligomeric compound of any of claims 29-33, wherein the conjugate group is attached to the modified oligonucleotide at the 5′-end of the modified oligonucleotide.

35. The oligomeric compound of any of claims 29-33, wherein the conjugate group is attached to the modified oligonucleotide at the 3′-end of the modified oligonucleotide.

36. The oligomeric compound of any of claims 1-27 or 29-35 comprising a terminal group.

37. The oligomeric compound of any of claims 1-32 or 34-35, wherein the oligomeric compound does not comprise linker-nucleosides.

38. A modified oligonucleotide according to the following chemical structure: [chemical structure]
(SEQ ID NO: 41) or a salt thereof.

39. The modified oligonucleotide of claim 38, which is the sodium salt or the potassium salt.

40. A modified oligonucleotide according to the following chemical structure: [chemical structure]
(SEQ ID NO: 41).

41. A chirally enriched population of modified oligonucleotides of any of claims 38-40, wherein the population is enriched for modified oligonucleotides comprising at least one particular phosphorothioate internucleoside linkage having a particular stereochemical configuration.

42. The chirally enriched population of claim 41, wherein the population is enriched for modified oligonucleotides comprising at least one particular phosphorothioate internucleoside linkage having the (Sp) configuration.

43. The chirally enriched population of claim 41, wherein the population is enriched for modified oligonucleotides comprising at least one particular phosphorothioate intemucleoside linkage having the (Rp) configuration.

44. The chirally enriched population of claim 41, wherein the population is enriched for modified oligonucleotides having a particular, independently selected stereochemical configuration at each phosphorothioate intemucleoside linkage.

45. The chirally enriched population of claim 44, wherein the population is enriched for modified oligonucleotides having the (Sp) configuration at each phosphorothioate intemucleoside linkage or for modified oligonucleotides having the (Rp) configuration at each phosphorothioate intemucleoside linkage.

46. The chirally enriched population of claim 44, wherein the population is enriched for modified oligonucleotides having the (Rp) configuration at one particular phosphorothioate internucleoside linkage and the (Sp) configuration at each of the remaining phosphorothioate internucleoside linkages.

47. The chirally enriched population of claim 44, wherein the population is enriched for modified oligonucleotides having at least 3 contiguous phosphorothioate internucleoside linkages in the Sp, Sp, and Rp configurations, in the 5′ to 3′ direction.

48. A population of modified oligonucleotides of any of claims 38-40, wherein all of the phosphorothioate internucleoside linkages of the modified oligonucleotide are stereorandom.

49. A pharmaceutical composition comprising the oligomeric compound of any of claims 1-37, the modified oligonucleotide of any of claims 38-40, the chirally-enriched population of any of claims 41-47, or the population of modified oligonucleotides of claim 48, and a pharmaceutically acceptable diluent or carrier.

50. The pharmaceutical composition of claim 49, comprising a pharmaceutically acceptable diluent and wherein the pharmaceutically acceptable diluent is artificial CSF (aCSF) or PBS.

51. The pharmaceutical composition of claim 50, wherein the pharmaceutical composition consists essentially of the modified oligonucleotide and artificial CSF (aCSF).

52. The pharmaceutical composition of claim 50, wherein the pharmaceutical composition consists essentially of the modified oligonucleotide and PBS.

53. A method of modulating splicing of an SCN1A RNA in a cell comprising contacting the cell with an oligomeric compound of any of claims 1-37, a modified oligonucleotide of any of claims 38-40, a chirally-enriched population of any of claims 41-47, a population of modified oligonucleotides of claim 48, or a pharmaceutical composition of any of claims 49-52.

54. The method of claim 53, wherein the amount of SCN1A RNA that includes an NIE is reduced.

55. The method of claim 54, wherein the amount of SCN1A RNA that includes NIE-1 is reduced.

56. The method of any of claims 53-55, wherein the amount of SCN1A RNA that excludes an NIE is increased.

57. The method of any of claims 53-56, wherein the amount of SCN1A RNA that excludes NIE-1 is increased.

58. A method of increasing the amount of full-length SCN1A RNA in a cell, comprising contacting the cell with an oligomeric compound of any of claims 1-37, a modified oligonucleotide of any of claims 38-40, a chirally-enriched population of any of claims 41-47, a population of modified oligonucleotides of claim 48, or a pharmaceutical composition of any of claims 49-52.

59. A method of increasing SCN1A RNA lacking NIE-1 in a cell, tissue, or organ, comprising contacting a cell, tissue, or organ with an oligomeric compound of any of claims 1-37, a modified oligonucleotide of any of claims 38-40, a chirally-enriched population of any of claims 41-47, a population of modified oligonucleotides of claim 48, or a pharmaceutical composition of any of claims 49-52.

60. The method of any of claims 53-59, wherein the cell is in vitro.

61. The method of any of claims 53-59, wherein the cell is in an animal.

62. A method of ameliorating a disease associated with SCN1A comprising administering to a subject having or at risk for developing a disease associated with SCN1A a therapeutically effective amount of a pharmaceutical composition according to any of claims 49-52, and thereby treating the disease associated with SCN1A.

63. The method of claim 62, comprising identifying a subject having or at risk for developing a disease associated SCN1A.

64. The method of claim 62 or claim 63, wherein the disease associated with SCN1A is a developmental or epileptic encephalopathic disease.

65. The method of claim 64, wherein the developmental or epileptic encephalopathic disease is Dravet Syndrome.

66. The method of claim 64, wherein the developmental or epileptic encephalopathic disease is any of Genetic Epilepsy with Febrile Seizures Plus (GEFS+), febrile seizures, Idiopathic/Generic Generalized Epilepsies (IGE/GGE), Temporal Lobe Epilepsy, Myoclonic Astatic Epilepsy (MAE), Lennox-Gastaut Syndrome, or Migrating Partial Epilepsy of Infancy (MMPSI).

67. The method of any of claims 64-66, wherein at least one symptom of the developmental or epileptic encephalopathic disease is ameliorated.

68. The method of claim 67, wherein the symptom is any of seizures, behavioral and developmental delays, movement and balance dysfunctions, motor and cognitive dysfunctions, delayed language and speech, visual motor integration dysfunctions, visual perception dysfunctions, executive dysfunctions, growth and nutrition issues, sleeping difficulties, chronic infections, sensory integration disorders, or dysautonomia.

69. The method of claim 68, wherein the seizures are frequent or prolonged.

70. The method of claim 68 or claim 69, wherein the seizure is any of convulsive, myoclonic, absence, focal, obtundation status, or tonic.

71. The method of any of claims 62-70, wherein the pharmaceutical composition is administered to the central nervous system or systemically.

72. The method of claim 71, wherein the pharmaceutical composition is administered to the central nervous system and systemically.

73. The method of any of claims 62-71, wherein the pharmaceutical composition is administered any of intrathecally, systemically, subcutaneously, or intramuscularly.

The application's sequence listing, which the Patent Office published only in electronic form, follows.

SEQUENCE LISTING (892 sequences)

SEQ ID NO: 1 - DNA, 170000 bp, Homo sapiens
ttttcattatgaaaagtctgtctacagttttctcttcacatctatctgactacaatatagttataaacccatctgtttcccaagtaacattctcttctaaaagtaggataatttttttccatagaaagctcagatataaaatgaggagactttttgctctttaggaatacaaatcagcttagactaaccaatcacactgaatttttaaagattttaccagtaaccaaaactatatattaatggaaaatggatatgggggaaatacatcctttgtcttaaaaacagaaccccaactttatttaggggtggcaatgggctcagctaaaaacacagtgattccacattcccttgcaggagggagcagccatttttcacagttatgacccataggctataagttaaaatctctagggggtttgggaaagctcttggaggaacctgatttagctggcatgtgtcttatgccttttggtcttcctatccttctccctagcatgtagttaggatgctggaagtgaggcagccatctcaagaccatgaagcaacaaatagaaggatgaaagtcacaagctgaggatgtttgagaggaagaaaaatgagcttaggcctctgaagactgtgaagtcctaccttcagactaatgtcacttaagaaaaacgaacttctattttggttaagttagtatatgtttgattatctcttacaagcagccaaacctataccaagttgatccaattagaagaatgtgccaaaaaaatcttttaaccgtttccaaacgtgcatttcagaagcattcatttactttggcaattattaaactgatatatattagtaaaacatttttatacacttcttaaaatgactcctccaaataactctactaggccatactctatgcacttcctatacagggagggacacattatgaatacttttcatccctccattgattcattcagcaaacacttattggaggcccagaaagcattgtgctaggggcagggatgcaagaatgaaaaacacacacctgattacaaaaggcttagtttatttgaaaagaataagacagaatattttttaaaaacattctattttccagttctttgcttcctgagggttgtttgtttcacatacattagctctccaagggatagagaagcctagcaccataatcaacatcaataaaataaaaggatctgagccaacaaattggtgtacatagcttaatgttcagaacacaaattcatcattgaatatttaattaaatgttgcaccaatgtgttcattactgttgtgagaaataactgaagaaagtttctcattccaatcagtacagaacttgtttttccaaaatcagactactgctaaaagcagatatttagtactactccactttttttttctgtcatttgtatgatataaaaaaatcactgtacatcaagcctttactccagtatcaaaagacaattattcattgcagtatagctgacaaaataacaagttagtgtcaggaaaaccatttttcactcacctcttcctctatgtcaggcatatcatctaacttctttctacctcagtttccttatgagttaagtaatgggttggaattagatcactgtgttccctcatagatctaaattctcttatttcctcactctacttagtgtgatgcattagcagataggtttcccagctaagagcagaacattaagattatttttaaatgatgtgtggttccttctctatttctgttacctcaggaattatacatattagccaacaactcatatcaaaccacaattttatatataattaaacaatataatgtcatcttttattaataatactatatcaccatactcaaaatcagaatagaagactggttttattatttctagcttttaaaagcataacttgcattgcacacatttgggataattgaaagaaaattagatggagtgtacattgttttaaatttgctgttcacattatcccccagatatctaggagtaagtctaacacagattatctcaaaagcacagcaatcctcttgctccattataagaaattattttcagagtctaaaagattgattatatgcaaaatctgaaagctaaaattaagatcttatttttcagtatagacaatagaagtaattaattaacacatctgacatttatcggcaacccaccataggcagagatctgctttcttattagttgcataagattttcagaagttgaaatacattaaatacaaccagtttaacccaccacgttctgaatttgatatcctattaccttgctcacaaacaagatctttaaggaacataaacactctttacaaatcctttagttaccatcctgcaaaacaactcacacccccaataataatctcattacatatatacatatttccctctactcaccacaatgagttaaaggtggacaaaagccctcggtgactgtctttgagttattactttgctttaccatttccttccttttaggtgtcatggtacaggactttactgatagcaattcattcttgttaggtttactgcaaacaccaaaagaggtgtcttgcacttgctggaagacttagcttttatgcttctggtcattcttcccacaaaaagaatgagaccagtttctgagctattcttaactcgccttccaaaatatttcaaaagaggaagacaagaaagacttcatgatttccatgcaaactcccagcctgcctggctgcctgctgctgccaatacttcttgctcttgctggtgatgacattcagagagctccccagcactggtgcttcgttatgtaaggctgtctaggtcaagtgtaggagacacactgctggcctgtggaaactcatggaactgttcctccagattaacacttcaggggttatggaagctggaggaagctgagcttttactacatcttttgggggtaaatatttttgcatgtttcagcagtttatgtactacagtcttggcagatgcctgtcagtcatgctgagaggtgcagggagaaattactgagattacagttctgtcagcatgcttgaataagcatagtaagtcttccagtaatcctggctttgagacacttaaggagtaaataaatcataaattcaaatttgcttatcggacatcatctgtaaccatcaaggaatgaatgttgatttgatatttaaactctgaatacaatttatttgattggaggtgttgtaggagagcattattagaggtggctattagctcaaagagatttactgcagttcttggctgttacgttgcccttgtctctggctgcaaatttgcttcccttgtaagtgagttatatatatgcctgtatttgtcttctgttgtgattgtttgtgatcgtataagaataaactggcagttaggtgacttcaacaaataatgaatcctgcctacttagtttcaaggtgaatactgcagcaaaagcgccattcgacactagcactgaaggagggtggattaactgcattggctcaaactgtgctgtgtttaggagacttgaagggatgattccaggtttgatatgaacagttgttcactctatgggtaaaagtagaaacaatatagcgctgattctgttttagactctcacactgtgtcctgcctcagcaattagttaaaatagcaggctctttattgaatgctgcagaaaagcctagagaggtagcagggtaagattgccgcagcagagtgatatattggccaggaattttaataagatttaaccagatatgataatacaacagatggcatctaatctaaaaaatagatggatatttaaaaagttgaagacaaatgtagcacatttgagagggtttatcttcctgtgtgtccttggcaagtgaagttcagtaccttggacaggatgacatgagttaggaaagtaaagtctgcataaactgtctacgtgatctcaaagagcaaaatggaaagttaactatcaatcatttgttttggtgtctctcagtgatgactggcattaggcaggttacttagcacatactttctaggtaaacaggtagttttaaagtatctaaaatttcttgcattttaaaaattaaattaaaggaatgaaaatgagtgatcgtaaaataaattcccctgaaggtacttttcattctattaaccatattaacagcagcacattgattatttatgatgaaaatataccacttacaattgtatgctgtatttagttgattaaacatgtacatgatttcccaaataatttaaagagacaattatggtccctcggggcctgattttatattactgaagtcaataggcattttccctagacatagcttgagataagagccccatcagaccaggttttactcagtttggcattcagactattcctcataagttaaaaaatgatggatacatacttaattgtacttataatctttgagtttatatatctttcagataacaatgtcagtgttcaaattgtctataattgatttgcatttaatattgtttcttttggctattgctaaaagggattcttctttgttgtaataagcttaaaatatattaattttttcattttaaaatggggaatttgaattaaatgaggtttaaattagttttgattctaccatatatatctttgtattcctctaaatgggaattaacattattaactaatctatgttaaagtgagattacattttttggtgagattatattgtttgaatatttacaatattaagccaaaatttactaagtacctactaaattctaggacagtggttttcaaagtggggtctcctaaccagcaacatcagtactacctgggaacttgctaggaatgcatgttttcgggcctcatgacagacttactgagtcagaagctctagggatgggtcctggcaatctgtgtttgtgtaagcctttcctccaggtgactgtgaggcatgctgaagtctgagaaccactgtgctgggaagtaatttggttaaatattataaaaatggtttttactgtatatagttaaatacatattgtcattaaattttctatgttcatctttgcctagatatcctactgtaagcagtactatgttttaaagatttatgcaattattgagtataccttaagtctaaatatgtccataagaaggtctattttccaacagttccattttagaactttagctcttagaagttaaatactgtaatgggaaaaatactagaggacttatctgtttgttcactgtgtgatttggcacatatcactgaccctctttgatgttcagcttctcatttattaagatgagaggttggcttacatcagggtttctcaactcagtactattgacatttgggtcagatattcttcgctgtggggtctgtcccagacattgtggaattttgagcagggtccttgcctctacccacaaagtgtccatagaaaccctcagttgtgatgaccaaagatatttccagacattgatacctgtctaccaaaggcaaaactgacctcctcctcatttgagaaccactgacctagattagctccgctatgaaaagttccatcataataaataatacaacaaatatatcatttatccttttggaagtaggtaggttaaaacttataaataaatgaagacatgttttacttgtataactcaggtataaggtgggacctgtttgcacccttgaagatctaggtgacgatctattggtagatatctgttggcagatatcttgctcaggtatctaccaataccacagtcagtggaagtccaaaaccttctgcaacttatcagggacttagtcttacatcatcctctgtgtcctggcatcgtggtttcatgtatactacacctaaccactctgtcaagtgacccagtgtctgtctgtccctagtttttaacagagacttacctacaccaatcaccttttcaatttaataaattttattaaagatgtgggcttctacccgcattttctcccttccccatcccatctctgctcctcatcccctccctgagagatctgaacactccaaatttttctcttcttagtatggaaagtagtccatctctccacagctcttatatccagacgtagatgcccaaactcatcaaagagtttagaagataaagggccttcaatttagaaccattcaccatacatagaaggcagttggggtcatatggtataatcataaagttataaaatcataggctgttggaaggaatattgaatttaagttcattttcatgtctttagccttaaaattacaaatgttacaagctagagtctcagaattttaaattataccttcccatgaatttttacctaaaccacttggcaatttagtacagacattttctcgacctgatatgtgcgatagaagtagacaagcctcacacacatgcatgtgcgcctacacacacacacacacacaaatttttctccaacagttaaagattcttttcaatatactattctacaattcaaattaggtgctattctgagatatatgtggattaaggaacctaatataagatataggtagctatatttctgttaaaataataatacctcatacttgaatgactatatatgtattttcaagtaattttaaaaacatgatccctgccgggagtggtggctcatgcctgtaatcccagcacttggggaggccgaagcgggcagatcacgaggtcaggagatcgagaccaggtggctaacacagtgaaatcctgagatcgcaccactgcactccagcctggacgacagagcgagactctgtcccccacaaaaaaaaaaaaaaaaaaaaaaaaaaaaaaattacttaggccaggtgcagtggctcacgcctgtaatcccaacactttgggagaccaaggctggcagatcatgaggtcaggagtttgagaccagcctgaccaacatggtgaaaccccatctctactaaaaaatacaaaaattagctaggcatggtggtgcgctactcagaaggcagaggcaggagaatcgcttgaacccgggaggcggaggttgcagcgagccgagatcacgccactgcactctagcctgggcgacagagtgagactctgtctcaaaaaaaaaaaaaaaaccatgatcctttctgagacccatagcaactctaaaagataggccccattatctctgtcattttgcagtgagaaaataaaggctcaaggtctccaaatgccaaattcacttctcgttccactatcctacaaagcaaaactcaatagttcatgtagtttgaacacattggtaagtataatttctaagtgattttttataaagacctgtctcaagagtcttcctgctctaagaccttcagagagattaccagtgctttgttttattcctaggattaatgcattttacctgacttatcatacatttattcgtatcatatgcttaattaattttccggtatatgtattatagaatgattttaatacatcatttattatactagtcatagtcacatgtgttctatcacttagtgccctcaaaaaactccatgggaataggattattacccccttaagagggaataattcaaacatgagattgaattaaatttccctatacttgagctttaccagaggtaccacactgatgacccagccaacttctctgttttcaccaacgaaaatgcagaacatagcaacagaccatctcttttcactggcaccctccagtgcttgacatatagagagtgtcagtaacttttattgaagaaatactgaaatattgttattgctatgtagttcctttacattttggactttacctaacattaaccaccctagttaattaagtagcaacttgcaaatgaggcctggaagaaccaaaaaacaaattttaaaaagaactgtctgcaactcggaactgctaatgctactttctttgtttcactttatttcacttgagaaaatctctttgggtttgatacggagatgttctcagactttgaatgtgaaaaattgttcccaagatcaaatataaattcctcctttaaaatacaatgtcacaaacctggatcacaaagtcacttccctctttagtcttaaagtgaatactcaagatgaacgtgaatgatcttttattccaatttccaatttagaatattatttcagaaaataattattcaaagttttttgagaaacctccacataaagccaaacaaatttttaccaaagtaaggtaaattctttgtcaactgagagcctgaattagatgattcctcagacttttttctaattataatattctaggtaaaggagtttagctcggcaatatgaccatccaaatatcaaccaaatccaagatgattagatttaatagcgccattttggagatgcattgattattgaagataagtaaaggtctcaacatttttgttttcctcatttaccccaaaatacatccttagtcacacatgtcttaggatctggaatttgtttgataaaaatgctgagttctggccaggcgcagtggctcatgcctgtaatcccagcactttgggaggctgaggtgggcagatcatgaggtcaggagatcgagaccatcctggctaacacagtgaaaccccgtctctattaaaaatacaaaaaattagccgggcgtggtggcaggcgcctgtagtcccagctactcgggaggctgaggcaggagaatggcttgaacccgggaggcggagcttgcagtgagccgagatcctgccaccgcactccagcctgggcgacagagcgaaactccatctcaaaaaaaaaaaaaaaaatgctgagttctgaaaaaataaatctttcttgttttgtttcaaatgaaattatagctctctgataaagtggcattcctttttctgttttatattcaacgagtgtattagtccgtttttgtgctggtaataaagacatacccaagattgggtaatttataaaggaaagaggtttaatggactcacagttccacatgactgggaaggcctcataatcatggcagaagacaaaggaaaagaaaagacacgccttacatggctgcaggcaagagagcttgtgcaggagaactcccatttataaaaccaacagatctcatgaggcttattcacttactagaacagtatgggggaaactgcccccgtgattcaagtatctccacctggcctcacccttgacacatggggattattataattcaaggtgagatttgggtggggacacggccaaaccatatcagcaagtgaaacagtgaaattggatttctaaaagttgtcagtgttctgttggaattattttattcagagaggtaaggaaagtacaacaggtgtcaaccttccatatgaaatttcctaaagaatattattgttacctcatgctgggagaagggaaagtagcagtgatagagtgttttgatttcaaatgtacagcttctagtaaaagcattataattaactttatagtagtaagcacaaccaggaatataaaaatataaaagttttgggtttggcctccagatttaccaaatgttgcttcctaacaattagccaaccctcccacactgacacttactttgtctaaattgagttttaggagaaaacaacccaattataaagacacaactattatcagtcaatgccctgacaagaaacagatggctcctccaaacttgtggaaataaaaagcaaactatttggttttatcttctcaacacgatattttcatggattccttgggaatgcggttccagttttccctctttagcaggtgtgccaggcccttctgatctggctgtctgcctacctctccagactctagccacttccacagacccaactttacatatatcctacatgtatctcctcttcttagaatgcacctcctctttctcctccaccctctttgtgtctactcataaatgcctcagagaaattcctagataagtttaagacagtctagattctacttcccagtcaacaaagaaaaaagtttgataatttctggtgatggaaacagtttcttatgctgttctggaatataaaatggtgccacacctttggagggaaatctattgatacctactgggttaaaaggcacatacccttccacctgacagatccatttcctgagactagatcttaaaggaaaatttgcacaagtgggaaatgcaattgtaaagaaatgtatacatccgcattgtttgaaatagaaaaaaaaaaaagaaaaggaagaaagaaagaaaataacataagtgtttatcatctgagaactgattaaataaactttggtatatccatctatatacagaacaaaatattttaagcaataataagtgaactaattagagataaattatgtaacttaaactaggtttacagccatatatattgtgtgatgtttttctttctttttaaaaaaatatttgtggagatgggttctcagtatgttgcccaggctggtcttgaactcctggccccaagcaatcctcccacctcagcctcccaaattgttgggattacaagtgtgaaacaccatgcctggtgtctggtacaatgttatttataaaaaaaagaaaaatataaaacacgtatatttcagatgcttggatatacacaagaattctaaagaagataaaaaaaaaaaaattaacagcgattgccactgcagactgggcctgagggaagagaaactggaaagttaatttttacttcaagagccactcaagtcaattgacattagaaatgtgacttagaagagtagattgggtttgcttggtgtatctaaatagtatgtacaagcagggctgcaaaggggaatgggaacacccggggagtggtgagcagggcagaatggctgatttacatgttcaaggtgcagaaggaagtgagtaggctttaagagctgaggccagatgtgacagccagggcttctcaaacaccaatgtgcacagaatcacctggggaaatcttgttaaaatgcactttcttatttagaaggtctgggtggagccaaagagtccacattttcaacaagctcccaagaagtggggatgctgccagtatgtggccacactttcagaagcaaggttttaaaattctgaaagtatcctggttttgcgcggtccgtgtcttcacaaacatcaagcagagccgaaaagcacttgtttttagaaaatgagctgagaaaaaaacacctaattaaatacgatgtttgcaacatgaagcttccaccaaaggaagcttactgttaagtgttcacgatcagcagttctgctttgctagctttttcatttctaacaaatttagacttctggagattgaagctttgccagattgaggcatgcttctcccctcactactcatgtgtttagtgtatttgttaacttggtgagagtacgtccaaacatagttatattctttcacttgctatggaagattgaagaatctgagacaagtaagaaggaagatctccatttgcctccctcccaccctgccacatgctgccccctaacatgtttgacaagaatccaggctacagactgatcatacacctaaaaactatcttcggtcagctacttgtagaaatgtctctcccccattatgtccttatatgagcttaatgtgatgtaatccttagcagtaaagaaagactattgtcttctgtttgtttgcctgtgaactcgaattgcagagactttccaccataattttaataatgtgatattgtggagagttttagtatggccttatggtaagattaggtactttggagatacactgctggtttcagaatcacacttagtcacctcgttactgtgtgatcttggccaagatgctcaactactctgagcctcagttgcctcatttataaattcatgaagataacatggtaatagcaactattttatgagactgttgtgaggtttgaaggtcccaaaatatattaagtcctcaataaaattaacaacaattattattattctaaaattattcttagaatttatctaaaaatagtactgcttgaatatccatatgtttattcctgagtctctacctgctatgatttggctgtgccccactcaaatctcatcttgaattgtagctcccataattcccatgtgttgtgggagggacctggtgagagataactgaatcgtgggagcagttttccccatactgttcttgtggtggtgtataagtctcacgagatggttttataaggggtttcccctttcacttggctctcattctctcttgcctgctgccatgtaagatgtgcctttcatcttctgccatgattacccagtctcaggtatgtctttatcagcagcatgaaaatgaactaatacactgggcaatttacaaaagaaaaacaagtttcttgaactcatagttccacgtggctggggaggcctcacaatcatgctggaggcaaggagtagcaagtcacatctcacatggatggcagcaggcaaaaagagagtttttgcaggcaaactcccatttttaaagccatcagatcttgtgagacttattcactatcatgagaacagcacaggaaaaacccacccacatgattcaattacctcccactgggttcctcccatgacacatgggaatggtgggagttacaattcaagatgagatttcagtggggacacagccaaaccatatcattccactcctggcccctcccaaatctcatgtcctcacatttcaaaaccaatcttgccttcccaacagtcctccaaagtcttaactcatttcagcattaactgaaaagtccacaatccaaagtctcaaggcaagtcccttctgcctatgaggctataaaatcaatagcaagttagttacctcctagatacaatgggagtacaggcattgggcaaatacagccattcaaaatgggagaaattggccaaaacagaggaactacagaccctgtgcaagtctgaaatccagcagggcagtcaaatctttaagctccaaaatgatctttgattccatgtctcacatccaagtcacgttgatgcaagaggtgggttcccatggtcttgggaagctccacacctgttgctttgcagggtacagactccctcctagttgctttcacaggctggcattaagtgtggcttttccaggaacacagtgcaagctgtcagtggatctaccattctggggtctggaggatggtgaccctcttctcatagctccaccaagtggtacactagtagggaatctgtgtgggggctctgaccccacatttcccttccatactgccttaacagaggttctccatgagggccccacccctgcagcaaacttttgctgggcatccaggcgtttccatacatcttctgaaatctaggcagaggttctcaaaccccagtttttgacttctgtgcacttgccggctcaacaccacgtgggagctgccaaggcttgaggcttgcaccctctgaagctatgacccatgcactatgttggcccctttcagccatagctggaatggctgaggcaaagggcacaaagtccctaggctgcatacagcatgggaactctgggcctggcccatgaaaccacattttcatcctaggcctccaggcttgtgatgggaggagctgctatgaaggcctctgaatgccctggagacattttcttcattgtcttggggattaacattcagatcctcattgcttatgcaaatttctgcagctagcttgactttctcctcagaaaatgggattttcttttctattgcattgtcaggctgcaaattttccaaacttttatgctctgtttcccttttaaaattgaatgcctttaatagcacccaagtcaccccttgaatgctttgccacttagaaatttcttccaccacataccctaaatcatctctcccaagttcaaagttccacaaatgtctagggcagggacaaaatgccaccagtctctttgctaaaatataacaagagtcacctttgctccagttcccaacaagttattcatctccatctgagatcacctcagcctggatttcgttgttcatatcattatcagcattttggtcaaagccattcaacaagtctctagggagttccaaactttcccacattttcctttcttcttctgagccctccaaattgttccaacctctgcctgttacccagttccaaagtggcttccacatttttgggaatctttttagcagtgccccactcccagtaccaatttactgagtagtccattttcaagctgctgataatgacatacctgagacatgacaatttacaaaagaaagaggtttattgaacttacagttccaaatggctggggaggcttcacaatcatggcagaaggcaacgaggagcaagtcacatctcacatggatggcagcaggcaaaaagagagctgtgtcagcaaaatcccatttttaaagccatcatatctgatgagacttatgcactatcatgagaacaacacaggaaagactcgccaccatgattcaattacctcccaccaggttcctcctactacatatgggaattgtgggagttacaattcaagatgagatttgagtggggacacagccaaaccatatcatacactaccatatactaggcactgtattaagggttagggtattaaatagaatcttttatcataaagatttttgttcatctctgtaaaatattttagacacatgtgttttgctttttaaacaaagaaaaagagatgtttttagagataagatgagacacattgttattttccccagttcccaccagcccttcacaactgccaacctggaaaaaacattcccagagcccaacaaatgctggagccctggaagaagggctactagcaggagcactggactccaaggaatgcagaccagggaagagagtgttgggagtattaaaatgtaggttagaagtggaataatggacaagtagagggaaagactttcaagtccactttccagggattgagaaacttggggtccttcatccgttggctttgaatgcagcccaagacaggcattagcagaaaattggagagtctccccgaccacacctcacttcctagcttaaaaaagcagctgcattcctctttagttaaacctctcagttgggtcttctaaagctctagctctcaccggaatctggtgccactttcactcttgcctggaatggcattggctctctctattgctagttcctgggcactcatcaaccatcttaacccacttggtcaatagtttctccataattatttttattttaaccattttgaatgtaccatctactttctgctaggaccatgactgcatctgaggtataattttaaagcaacaaatggttcatggaagggtaactctgtttgtgatgcccaagagaggagacttagggcagatagagatacatataaagctactgctgtcctagagagcagagggacaagaaaaggggagagagaacactcattagcagttgtgtgtgtgtagcataacataacatatatatatatgcatatatatgatatgtaatcttagaaacaactaccatgtgaagtagagcaaatgatcgctgagtttcatccttgctaagagcatgggaaaatccacattctatgtttgcttagttgcagaaagaataagggaagcagaaacgtcaggggtcacatcccctatgtgtcaattaaaggggtgcagactcagaaggtgtccttacctactttatttagcctgctcttccccacaaagatgaggaatacaggtgactttgatgtcatgatagcaatcagaatgtaaaagagactttcaaaaagacctagtgcaacatggaaacaaggactttagtctctgagcttccttatgtatcaagtgtcatagaaaatgttgagacaaagtggttctgtcatttcaacaacccataatgagcagaagaatctgtttgcctttcatgccactgcagatgaacaggtatgagagactgcacttaggcatgaaagtgccgctgcctagcacctctatcccatgctcacatccgaatcttctcaggtgtgggtaagacatctcagttctctgctatttgatatgaataggggcaatcccagaagcagcaactgagctcatgggccccaaaatttccaaggaatcacgaggagaactaggctaaatgtcattattttctgaccttcgatgtaccttttccctagtcacttgccaatctcttctaaagggcctcagtccctggagtggaccctaatgatttctgtccattatttggcctagagtagaattcttgcttttctcaaggaaagaaacaaaaagaaaagatgtaaccaaatgtaatttatgtgagtttgtaaattgatatccgaagattggaactgcatacagatgtgtcaaaaatgttaatttccccaagaaatatggtagcacctaattctagcgacacttgtatactttacagatggctttgctgtgctcctggtaaagtcaatgactttctgcctttgaacatgaaaggaaaaagatgttgacaggaattctttagggaaacagaaactacatatttgcttatgctaagttatggcaaagttcagttttattctgtaaataaagcgttgtcttcataaatatcagctatatcctttagagtaaagaaagtcctctttattaaaaaaatctaattgaaactcttcaataggtaggcaagtgaggtgattgatataaagatatacttaagtggaaaattggtattcgagttccaataagtaatcaatcatattgttcttggtaatagcttttgttgattcatctttgcaagggatgtcggggggtaggggggattgctgaatgaaataaatcaggaaagaacccaagcattatgtttaactgacttaagagcaaaggaaagaacacataaacacagaatagaatccacacagtaacttcattctttatgattgctcaggcattttcattatttgcatttatgtttattttctctttatcctcctgtggcaatagatatggagataatgctttaaatattgtgatgtaccttgatcttttctgaagaaccaaagctttatgaaatcttgatacatttaaaggaggggtataaagctcaggcatgtgaaatgttgaattttgtctccccatatgacagataaccatcatataaatgtggtttattagactaaaaaagtagaacacatatttttagattacatcttggcatttcaaagaaagtatagaacttcaagatagtttgcttcctggatattttctggagctgtctttgggcctgcattcctgaaagctgtcaatgctacactctgcatacccagagctcgtgcccttgggcttgagtactttgtggttaatatttaagaaccgcatgtggagctagattgaaggacagtcactttctttattctttgctaaaaccaatgttggttagtccatcaccttcttaaacagtaactgcattcatacccttcatcacatccatctctctgtcaaaacatgagtgaaaatcaattgtggcatatctagaaatacttcactcacttccattttgcttcttatgtgctgatgtaccttactcaatattaatttcctttagagttaaactgtgggaaaacttgaatggacctttgtggtataaaactatctatgtgaccttggacaagtcactgcacctctcttggcatcagtttcctcatatccaaaataagaacacttgcctggtttatctctgagacttttccagctccacaatttctcaatgattagcaaaaccctatcgataaagcaatggtaatgatttatgtaaattgacattcttttttatgaggtttacaaagttattttattctactccagggttttgttggaagtctattacggaatttttattcatcaatactcagcagatgttatcaggttctctccagaaactaccttaattctaccacagacttgggatatgtttggggaacaatgacaaaaaaaataagtcatagttcttactttcaaagagattattgagtggggtcagaccgtggagaggtgcaccgatagagggtggaggaagatgcggtcaaagaagagaaggtcctgaaaacagaggaaacaaaggaagcggaacagtgaaggcataatggctccctgcttgtttaggaaaaggcagagtttgttgttttgaaaaacgacatttagtgtcatcttcactaaatattaataatgtcttcttacacgttagctaaagaagaaaagatcaaaaataaaccaggcccccaaataataaaggatttaaaattaaagatatatacagagcactatagtaatttttgaagtgctgttcagttggtgatataatcagaggaataatgctattacatcaagtgataaaaagtaattttgtgatttaatactcattctgaacctatattgtaatgctaatctcatcagatgattgacattcatatacttaatttccctttgagaaatcaggttcatgtattattctgtcttgtttataaaagctacttatttggtttaggaatattgttatttccctctccaacaccaatgtctgcctatgtaattgaaaggaaattgcagtgaatcttccaacaaggagtaactgcttccctgaaataatcacctgcagacataattctggcttctgtgcgttgtctcgatagcagggaaggcagagggcaactggggaatctgattatctccatcataatcccacaacttccctcctttctcttttgcttttaattactgcattgtggtgagttaagaaaagcctatactattttttcttctccactaccagaaagagagagagataactggcattctctctctaaggatttttaaaatacttttaataaaattttaaatagtgtaatgtgtgcccacaagcacattggttctaaagatacttcaaaaatacttcagaatcaaatctgtaagaaaaaaaaattcaattatttatgttcattatattacaagtgatttaaaaactggttatctgtgcatcaaaaaatgcaagcctatagcagctctgattcagtgaattccagttgcggggaggggaggagccctcagatatttttatatcatatttgaaaaaaatggctgattattatttttttaatttatggaatgtatggactttaccagagtttcaaaagtccactttagtacctataagatattttgaaatcagttggccaattcttgccatcaaaaaattgtaactttaaacttgcagaaaaactagttggctctagtcctaaaagagagttcttaattgcagtttctgcatttatttgtctaatagcaaataaatttcacattcatttctgactccctttcaaaagggcaggttaatctcaaaaggaaatatatgagtttatcattttcggctaggatatggtttctatttctaaaatagtggcacagtgttggtgaatgctttgtgagagcaaggaattggtagtagatttttgcagaatgctgcatttaccaaaagaaaaaaaaaaaccactaggaaattgacatctacaaaagcaaagtacttaagtagtaaattacatttaccaaggatcacatcagtagtgtgctttatctgattattccaatcaaaagggggcaaagtcaggatttgtagtgatacagtggtcctgtagatctaaaatcttaaggtctgagtttaaatccaaactctagcatttgctatctgtgttgggatcactccccgacttcatcagaagacctgctaacatctagacttgtctgttgtcaccaccatctcctttgggataccacctcaaggtactcaagttcgcctccagcctccaattcctttcctgcggtgggaagagaggggagacccagcttcatgttgctcagtgactatagattcccaaacaaatgacaggggaatttagaaacatttctgccttaaaactcaaatgtcatttataactctaaacaagggaatctggaactcaaaacataatgatttggtcatcactttgggaaatttttggctaaaaattaagaatggtttccttctccttggcaggcataaagttaattaataaattctcttcataaggcagctggttaaagtttcagaactccacaactccaggagatacacatttgaaagaatatttttgataaccaattacctttattttctatgcaagaaaatattaaagaatattcagatactaattacactaattcctcagccttctgataatgagatagttctctctttgaactctttcaagatctaatggcatcgagagactctcctttatgtcgtaaaactaacagacaaaattacctggcccagctttttccacctgagtgacctcacgctctctttaatacccaaaatctattgacagagattatgtcccattataatattcccttttatgttttggcactgagcagtgcaactgacagagctataacaaagtaacaaccacattcacaggacagagacggagtcttacagagacggagtcttacaaagactaaatgacatcttacgccttcattctcttttccttgttaggaactctcataaaaaagccacagccatgccccctcagcctgtttagcaggttcatgcattacagattgaagtattgtcacctaggaagtaggcagctaattttttccagcttctgaaacaagattacaaaggggttcctggaatggctaactttaccaacgggggcagaggaagattagtttttcattttttgaagttggaaacgtaacagtgagaaagagacaaaattatctctcaataaattaatctacaaaaaaataaataaaatgcaaagctggttccacagggagtttacattctgggagccaaataagatacatatataaaactcttagaacaaggtcaaatgggataagtgtagtagtgacatagggtagcacagagttttgttttaatatcttctgctaactttaaaaaataaatatgtgattttaagtgcatattacactaatttaataaaaatctcatattttgcctttatgctcagtctgaaacatggaagatttaaagttactaatactgtaaaactgcttcagctctgacgaatgaagtatctgtgtacagaatgatgagttgttagttaatagtactctttgggccatgcttgggatattggccttttctaggagtctgtatgagaatagtcatttatctccttatgctcaatgctttcaacttgtcaaatgaccatgtttcataagatacaacataaaattgttctataattaacaaaagaaaaaagaattctatctgctgagaaaatagaaaagacgttggagaagagagaatatttgacccagacatttaaaatatccgccgaatttgctatgtgtagatggatgaaaggtctgccaagagaagtgaaggttgtgaacaaagacatggaggcggaagaaaggtagtgtgcacactgaatgcgttgtgcctttccatatgactgacatgtcaatgtaaactccacaaagggagggttttgatctggtttgtttgccgatgttacttaagtatctggaaaagtgcctggcatatatcaggtgcatgaagaagtgaataaatgaagtgtcagatgcccagaatatgaataatacttgatagatgcagtactggcaactttcttgaagctaatgaagtggttaggactccatagttcaacagaaaccaagttcacttaagcaaacatggagtttgagtttatcatgggactcaacatcaagaaagtgtttggatcttgagtagactggagatggaaacagtctgtctctgtcttttgtcacttcttcctccacatctgtgtggctggctgctatttcagtatcctggtccacctggtcctgagtccccatggtgagggaaagctgactccatagctgccagaatcacatgtagtggctctctttgaccaggtcagctgcgtagataccctctcttgctccagtcctctgtagcaagagggtaggtttaccactaaggatcaggggagaagaactattgggggaattgttaagagcagacactcagaaaaattggcacctataatatgcaattagaattcattaaaacatgtggccaggtatgttcttattttgtgtttttacatatctaatctctaagtactattcatatggaatgtattattctaaaaaaattgcctgttagttcatgcagttcccactctcttttcatctctaacatcttggcaatcgtttaccagttgttgatcacctgtctcctcatcttctttcaactttgccctgactctaccagatactgggcaacatcatttcccagacattgagtaacttcaaatgaatgtgttcatgctactccaactggcttttgggaaagcactggatagagtttttgagctggaacaggaaattatcttacttaatttctttcttttatagataaaaagatggatccacaagatggacccattggtccataattaagggctagtaaatgttttgtaaacatagaaatcaaaattacttttctgtgattctagaacaggaaaaaatggtgaacttttaggtatgttgcaaagaacagtggattattctttgggctcttgggaccaacagccttagttttattgctttgcaagctatgtggtcttgaataaacctcagtaaggctcagaaagcttcagtgttctcaagtataaataggaataattataatataataacattaatagtatttatctcaccatcctgtaataaggaagagaaggattaaatattgaaggttatattgataaatgataaaacacatgcaatgattgtaataagtgtgttagatggcaaaagaaaaataatgaggatgaaatatttacttccaatgactaatctacacataatcgtgattttatgtatgactgaatgtttaaggctgattccattttagaatacaatatataacataaaaagctctactctcagttccaagagttataattagtttggcatggatttttattgtcttagaaaaaactgatattcatggtttttataattctatctttgggtaataggcaattggactctctttctatatatatttgcttattaaaatgtgttattataattaagctttaggctgtgtccacaagatgggaaaacattggagtaaaatatagtaaaaccatagaaattgagagtgggttgaaagtcttgtttaatctgtaattacagatgaagatagtaagaatgtaaatgtccatagaagacttcagtggctttgttaaaggcatgtgttcatcagtgttgaagtaaaactcacattttgtgactctgagctgttcactataatatgaaacctaatcctaaaacacaatattaaaacagaaaaatgtgaagccatagatctgtaataaagggccacctgattgtttcctggtggaataaaaagacagttttatttataagatatatcatttttatagataacaatgattcatattaggaataaagtaacagtttcaaactaaaataatgctaaagtttttcaagtactacttgaaaatagctatatttactttcaaaccttttcctctttgagtcattaggttcatgatattatatagcaatagggaatgaaagagaagcaaggagaagcaatactgggagattacagagaagaaaggaaaaaaggctgagagaaaagaggttgaggaagaaatcataaatctggattgtgagaaagtgtttaatatttagccactagatggcgatgtaatgtaaggtgctgtcttgactttttttttttttttttgaaacaagctatttgctgatttgtattaggtaccatagagtgaggcgaggatgaagccgagaggatactgcagaggtctctggtgcatgtgtgtatgtgtgcgtttgtgtgtgtttgtgtgtctgtgtgttctgccccagtgagactgcagcccttgtaaatactttgacaccttttgcaagaaggaatctgaacaattgcaactgaaggcacattgttatcatctcgtctttgggtgatgctgttcctcactgcagatggataattttccttttaatcaggtaagccatctaattgtttcatcttgattttaagtttattcattccagttattcctttggaaaaagagtccatggaaattcagtttgggcagagcaggaagtccatttttgtatgtgtattcagaccaactgtccccctcctccctctcctcctcttctcctcccctcccctcccccctcctctctcaaccttccatgaactgaaatcaggtttgttttgcagttcagcattttgatagaagatgggattctttggcctgaaatagcttggcatctggccagttcttgcctttgcttgccttcatcctattcaaggtcccttttgatcctgttgaagccccctccttcactggtgctttggaagtggactagctggctgggaatagaggtcatattgttcttaaggacggagcaaaaattagatctcagttttaactccacaggaagaaagaaggcagcggggctgctgctggagcctagcattgcaggggtattcagcttcctgaggctgaggctgggcttttgagaagaaatgcctcatgccttgaacaaggaaggggcaatgatttccgccccccacctctgccaactcctattgagccacactaaaaaagagcttgagcagagtggtaaagagtccccttttctatccaatgccaaataggaaacattgacttacttttacttagacagaggtcacaaccagcaatgatactgcagatactgctcagttcctagtgtgaaccgtcttgcttttcagaacagcataagaattatttctgagtggaggtgaggcttgtccaaatgtctttgctatcatggatttcctgactcctacctgtttgaggtatgtgtttaaagacccgacccacttgctgcatttacttctcatttctttttgttctctttgattactcactggtgattgttaacaaatcggtctggagtggtgggtatgtgcttttcacctgtccaatgcaacaattaagtcaaggcagggtatattactgtcaatatgtgcatgtgactaaatatttctgagtgcagtagcaaacttgcaaattgccaattgctgttgctatcacacctataaaatgtgtcttcttcttctatggatttacaggttcacgtggtatttctgatgcgctagtatagtaacagaacatatttctccaaaaagcactttaaatcatcccaagaggatgttgccagacagaaataggaaaattccatgctgaggttggtgattcctgctttagtttctcctgcccagagaagtgggtagcttacctttcctatttgctgcaatacctggcacgccagggtgatgcaactgggagcttctgcacgttcgcggggcatctgacattcttctttccctcagctgtgcatttcaggagaatgactgtggtgaaaaactcttttaaaactctcttttatgattgttgcttttgtaattgcaatgaagcaattacaaaatcacatctctcttctaggaggagttttgcaatttaggccttccttcacaaagctcctggaagagatttttagctggtgtctattttaggaacataatgtgtagacaggaatgaatggccacagagatttacgggaaaccaatttcttggagagggtgaggtaacattataaaccactagaacagagcacaagtggctggttatatcacatggacccagcaatggaattagttttcattaaactcactgtaactcatttgtgtggctgtttttcctccttccttcacattgtttgtctgttttgtttcaaatatctatataggaggccaggatacccagagtgttcatactggtaacaataacacattggattttgctgccaatactaatagacttggtttacatgccccctcttgctgggaaatgtgctgtctggagagtcatttattatggtaatttctctttaagacatggcaggagggattgtccatctatgggctggggcaaggcggggcacaattggaggcctagttaattatacagtattcaagaaggcactaaggagctcagtcaggattctgttgtaccaaccagagataccaggggcaaccagaccgactagatacccaaagtaaactctatcaccaccaacagaggaatccagtaagaaacattctagttccttgtatagagggtactatcagggaatccagacaatcagagagggtaaacacaagagcacctcatctgggaattgctgacgaagaagagaaaatctggggcttgcttggtgttacctctaggacgtcaccaaccaggcatttctcaagggtttatgtcggtgtgagcctgacagtgacacacaaaagcatccctccaaaatttagcctggggaccttgaaaggtattgctttctccctgggcagttggagaggctgaacctactattttctccctgtactcgccaaagggcacaaagcctactctcttccagctacctcagaatggggagggtgggagaaacagatcccagagaaggatgggagagaatcagcaattgaaggtcctgtatagtcaccctcagggtcaatggggctgtgctccgtgaggttatcacttcctttttaaattctaattagtgaatgaagcatgttccaccgctcaattgagattgcattagtttagggtagggtgggaagaaatttattctcattgcacttgtgatcagaaaaataagttgtgacagaattccccaagctgccccaaagtttgcttttccaacttttaaattttgtccacattcctagatttccatttattaattgttttatttatcaaaaacatatagcatttactctgtgccagccactatcctaagcagtactttgcaaatatgatctcatttaatcctatgaggtagatactattgttaattttacaggtgacaaaaccaaggcacagtgaggttcaattaacttgctgggttatacagttagtaagtggcagaatccaagcagtccagccacaccgtggccatggcgtctgtgttcttgatgtttgctcatcatccatgtgatggtagagctacagcttagccaagagactcaggactgaagttgggtgcagtcgtacatgtgagctgtaattcatctgctttctgacatgccaaaattccaaaaacagtttggtttagaatgattacccaaatccactccatttgtttgtttgtttgtttgttgtttttttgagacagagtctcactctgtcacccaggctgcagtgcagtggcacgttcttggctcactgcaatttctgcctcccgggttgaagtgattctcctgcctcagcctccccagtagctgggactacaggcgagtgtcaccatgcctggctaatttttgtattttgtagagatggggtttcactatgttggcccggctagtctcgatctcctgacctcaagtgatctgcctgcctcagcctcccaaagtgctgggattacaggagtgagccatcacaccgggctatttgttaaaaaattaaaaaaaaaaaagctctcctgtacaatagaagatagaagggtctgcgttctaagtgcaggaatgtggtgaataaagcaaaattcctacccacatgcagctttcagtctggtgatagagttggacagtaggcaaatcaatgtgcaaagaaatgtcagtaaatgtaagttctttgaagaaaaatactgcaagataaagagatagtgaggatgagaggggcatgcaaacagaaaataatgaaagaggtggagaaaaagtttttttaagcagaaatctaatgaggccaatgatggattgaatcaaaggtgctaaagggtgaagtgcctcacaggtatgaagagtggcacaaaccttgtgggtgatcctgaaagtaaaagaaacgaacagaaatagcaccatagaggtgtgcagccagatctgtggaatctcagagattgggcttagggctctaactgcccccgacttttaaaaaaacaaatcaaagagttatgtcaaataaatttaaaacattcaatgttaacaagttattaggtttaaaaaaaacataaatcagtcattttcacaaaaaaaagttttgagagtttgtaaagttctctgaaaaaatgttgcagttcctagaatgcaaaaaaattgcctcaaaaatgttgaaaagaactgatccaaaggtagtgagttatctcagttgattgttcacagtcagttacagatcaaactccttgttctacgctttcccctcttctcactactgctcttgtctaaaaacttttttaaaaattaaaaaatattgaaaaggtactatttgatgaaaaaaaaattgtttgaatgagatcattggttagaatgatatagtcacccagtcagtttttcttcctccagaaatgatacactgaccaggtgcaggcaagaaagagacactaagcatgaaaaccagtgtttacatcccccatagtggccaggacacaggagctgcttggagggatttgaacaaatctttttttttttttttttttttttttttttttttttttttgcaaatgaatgagtaggaatgtgatttcaaaataatttgataaacatcagctttcattttcatctatgttaaaacttttgttaccatatttttattccttcaagactcatattccaatggtttatctttttatatttttttcactatttgcttcccctcattctcagttacctatggacactgtagttcttctctagaaaatgtgaatttgcttctcttctaacttagaatcaacctgacattttagcttttctctgtaaatggtcaaaagtctttgccttatcatattgcctgtttctcctttggtgctctacctacaaacttagatttaattttgatgaagaatctactctaacttttttcttttgtcacttgtgcttttagtctcatgtataagaaaccgttgcctaatctgaggtcataaaaatttacttctattatttttcaactagttgtataattttagctcttgcatttagatctaggattcattctgagtcaactttttgcatataatgtgaggtaggggttcagcattactcttttgtttgttcatatctagttgtcccagcaccacgtgttgaaaagacaattctttccccggtgaattgtcttattaacattgttgtccatgcgtttatgattttagcatcaattatttcttacagtgggtactagggatatatcttttaagaaaaggtcagtgagattctttgttcttgagaatccacataactttaaagaatcagaaaactgatccatatacccttaactattaaacactttattgatctaacttcacaacaaaatgtttcttctcattattggaaacatattcatttgtgactccactgaaaatttaaggagataatgagcaaatatttccagggaaaggttatatttattccaaagaaacatatttactgtattgcacatgctttcccaaagttacacaaatattatccatgttctttgtaatatatgttgctagtatgcttttgtttcacagataccattggggaaactactgaacttgagatagaggtgtgccattcaaatagggttggtttctgtattagttaacttgggctaccatgacaaagtaccacagacagggtggcttaaataacagtatttatcacagttctggaggctcgaagtccaagaacaaggtactgggaagtttggtgtcttctaaagcccgtctccttggcttgctgatgtctgtcttttcctctgtgcatgtgcattcctggtgtctcttttctgtctaaatttcatcttcttttaaggacacaagtcatattggattgtggttcaccctaaaagtctcatttcactaaaccacttcttcaaaggctctaactcctaacacagtcacattctgaggtaccggagtttgagactccaacatatggatttggggaggatacaattcagcctctaacagttgtctctggcaatacttatgactactaaaatcataagcaaagaaggttaaattgatatttttttgttgttgatgaaactgttgtggttattttataaatgatggattttcattattcataccctcctcctactggataataatgagttatctgtgtatgtgttaagattctaataaaggcaattaattaggtttgtaattacaggcatgatgactaacaaagtgggggcagaaataaaatgatggtgacactgattccactgctgtgcctataatgtcacatttacattcatgatctgtgataagaattaagatgctcatttatttcagtgaggaaagtgacagaaaaggatataaaattaggaattcatggggaattggtaaaaaaaaattaaagtattacaataagtaactgaaactgactcaggttaatttaagtataaaagcaatgtcttcaaaagatattatagttcacagagttaagggatagctacaatctagactgaaaaatgccaggagcagagaaaactataagagcagatagcccagttggtagacttttggtggtttctgtaaggtgctgtaatctagaatgaatcagctcaactgctttcaggctctttgtctttctttctttttctttttttttttttttcttttttttcctgacattcatgtttaacaccaaaattccaggaagtaaacatctggttggtcaagtttgggtcatgaatctgatccttttagttaagagtaaacttaactaacagttccttgactgacatttccaccaaactatccccatataggaaaactaattcaacccaaacaaaattggagagattaatagtctacataggccagatacagtggctcaaacctgtaattccagcactttggaaggccaaggtgggcagatcacctgaggtcaggagtttgggaccagcctggccaacatggtgaaaccccgtctctactaaaaatacaaaaaaattagccaggcatggtggtgtgcacctgcagtcccagctactcaggaggctgagccaggagagtcacttgaacccgggaggtggaggttgcagcaagccgagatcatgccactgcactccggcctggcgtctggatgacagagcaagactctgtctcaaaaaaaaaaaaaaaaaaaaaaaaaaaagagaaaagaaaaaagaaaacagtctacatacacaatgctggaaggttgaaagaatggctaaataaatcatagtctaggcaaatgatgaaatattatagtaccattaaacataatgtttcaatgaatatttaattctatataaaattgcccaggttataatagtatattaaaaagtaccttacaaacatatatatctaggatggccccaattacggaaaaaaaacaaacatgtttttccttagaaaaagccctgaagataatataatagttatctctggtttatagaattaggatttctgttttcttctttataaagtttttgttttaaaaatagaatattacatcttattttttcttataataaaagtaatacataaaggaaaaggaacataaagtacataaaaaaggaacataaagtgcataaaacaaaaaaaaaatttaaatagaatattacatcttatttttcttatgacaaaagtaatacataaagcaaaagtaatacataaagcaaaagggaaatataaattaataaaatgatgaaataactcacaattttacacaacaaaattattattgttaataatttattttttcaaatgctttggtattgtttcttaccaaacaatttggcattgttttggtatgttttcttaaaataaagttcaaaataaacatatgttgccttaaaaactagaataaaagtgtacattagttttcaaatagaatttagtaatctatttcatgcaaagatactcattgtatctttaatcaaaatagtaaatttagtttaaattattgatgaaacaattgaatgtttgaatattttgtcttttggaatattaataaaactaggccacaaaccttgtataataaaagtacagtattttgaaaattttgtaacaatggaaaagctttgggaatcggtctaatataaaattagacttgaaatagcaaattggtggtgttctgaaaatcatgttacttggtaacctaagttttctctttagaactcagcacgaattttaagaaatttatcttatatttataaaacatctactatttgcaatgagttgtttttagcaaaacttgacctcaaattgaacatttgagaatactgaagaataaataagaagcacctgtaaatactgacatagtatgtccttaaatttttaaactacttagaaccaaattcatcaagttggcaaaatgaagttactagattatcaaatggaatggcaagtgaaaatgagccagaggtggcagaatggagtaagaagggtaattattagggaatgctgcatttggagatgtgaaattatatgtgttgaggatgtgaggaaagaaatctgtgtgaggagaaatagattattaatgatgtaacttagtaacatcagattaagggtccccaaaccctgggccacggaccagtactggtccctggcctgttaggaactgggtcgcacagtaggaggtgagcagtgggccagggagcattacagcctgagctccgcctcctgtcagatcagtggcggcattagattctcataggagcacaaaccctattgtgaactgtgcatgcacaggatctaggttgtgtgctccttatgagattctaatgccagcccccactccccacaatgtccgtggaacaactgtcttccacaaaaccagtccctggtgccaaaaaggttggggactccttatctagattattgtaaagcaaatattcataattttaagattaaagaaaaaatccaataaagatgagaaaccggatctcagagtttccaattacatattcatagaggaaagaaagctaagagaattctgtcacatacatatttcaatctaagaaattcagtggatttgaaaatcctggaaagagttactttgagacttcacaaatgctaccaggcagcagttttgatattaccctggaatgtgatatgccacttaaaaaggccagtagtattttgggctatgtatgtcagtgtgttgggacaaaaccaaggagaaaacagtccggtgtcaggtctagaataccatcatttcagtgccacctgggcctcagcatttcaggtttcaggtgatttgaggagtctgtgaggtcgcacaataatatttaaggcctttaaagggtcaatcaacttgtacaaatgaaggcaagagtgcctttggaagacattccaaaaaggaagtttgagcatactcaagaagaatctagccactgcactccagcctgcgcaagagagtgagacgctttctcaaaaaaaaaaaaaaaaaaaaaaaaaaaagaaactaaatagaaatcagtaagcaaagaaaaagaaaataggagtgtgatttttcttcctgaaatctctgtggaatagcaaaaagtggaatcttgactgtatcttctctgggaccaaactttatcttactctccctgactctctctctctctctctcttttttttttcattcctaggcattttgttttactctgtttttgcatactctgctgatttctaaccctccttccattcagtaacatataaaaaaaacttttcacagtcatgttctcagaatgttcatagtctttaatgcatatagaatataatccaaaaaatcaaaaaaaaaatttttttttttgagacagagtctcactctattgcccaggctggagtgcaatggcaggatctcggctcactgcaatctccgcctcctgggttcaagcgattctcctgcctcagcctcctgagtagctgggattacaggcgcacactaccacacccagctaatttttctatgttggccaggctgaactcctgatctcgtgatccgcctgccttggcctcccaaagtgctgggattacaggcatgaacctccgtgcccggccaaaaaattcttaatgtgattttagcagttattttcaaaatgtggtccacagatgctcttgcattcccttgagactttttaaatgattcatcaggtccaaactattttcataatgatacaaaaacattatttacctttttcactgtgttgacatttggaagaacaatgaaacccctagccttaacacttatcaagacagtgacaacaaactatactgtcattgtattcttcactgtaattcattcccagtaaaaataagtaaataaataaatgaataaaattaaagccagttgcactaaaagaatgtctttgacgaaacactagaaattaattttatttaatctataccattaagtacacatatttttaatattcagtatacatgaagaaatggaaagtatacatgattaacatctgctgtatatcaacaataatgctggttgtcttaaggtaaagcacttgtgtagttgtttgagttgcaagctaaactagctgtacttccatagaatactatttttatttgaaaaaatgactgagagacaaattgtgattattcaaacagatattgaaaagacaaatttttgaaaataaatggagactgtcattttaaaaatacatttgacaatatttgttgtcagtgacaaaatttggcctttcaagagaaaattattattttgaaaaagatgcatctgccaccatgagctcaacagcttctcaaaacttacagggtttctgatgtgattagtggtaatattaacagatgaataatgaaatcttccaatattttgaagacctgcataacttagccaagcactcatcccattagatctttttcttttagaaatatggttattttcacttgaaatttattttgttgacatgtgatttatgattataatttataaatttattaattgatgtgcttgtgatttttctgctttctaacatggtaaatggcaatacattgaactcattataaagaagaattttttgtttcctcaataatattaacaatcaaaaggagtcttgagacaaaaaaattatgacaaggatgaatttgataattcatcagattctgggacactgaatctgatgaatttgataattcatcagattctgggacactgaatctgatgaattatcagattatctgataaattattcagattaagtttgttgcactgtattagttgagattattataatgcagataattgagtcccccagaattatgcaggatagagaagatatttgtcacattacacaagttagtacatttttcattactgtaatatgagctgcacatatcagtttagttcagtaagttctgtataaagtgagtaaaaattgttgcaaagcaaatcagaggattataaaatataaatgttctaatactcttgttaggactttcatctttcctcacctaaaccaatgtaagaagtttctattggtctttttctaaatgttcacccactcccttccctcaattagaacctgatctccatactaccaccagtgacctttcaaacatgtgggccacatctctactttttaagactgtaagttatatcctggagtaaaagctattcagttattcagcatggctggctttcatgagctgtccaggtttatttcttaccccatggtcgatctaccttaccattagtccttcagaaagaactaattgcatttctgtgaagacctaaagctgtttctatctctaggtctttgctactgcttctttatttggtgaatagccacgacctcttcttccccaagtatgattaatttccttttgtgttgtgcctaggtcctgtatacatttctatcatctctcccactgcactttattgtgcttattcccctgtcttcctctgctatactgtaccttctttgcaatatggtgcagcatattgtctgatgtgactaagtctcattgccactgcctacttccgttttcggtgtctaggttctcaatagaaattgttaaatgaaaatgaaacaaaacaaaaacatttttagggttacctttaatattaatacctgacagttttacattttataggatgctttcgcaaatactgtttttgtagaaatatgcttgaagcatataataatttaaataattcttttatttcttatgcaagtcccaaactcctattctaaactcatatatactatgagtattgaactacttatatatactatgattaagcactgcttttcaaagtaattctgaatgcattttttcttcaaattattactgttagctgtttttacttattcagtgtctgagaaatttgattacttctccttttatcattttgaggtattcttttttgtttgtttgttttagacggagtttcgctcttgtttcccaggctgctggagtgcaatgaagcaatctcggctcactgcaacctccacttcctgggttcaagcaattctcctgtctcagccccccaagtggcggggactacaagcatgcgccaccatgcccagctaattttttgtatttttagtagagatggggtttcatcatgttgaccaggctggtcttgaactcctgacctcaggtgatccacctgtttcgaccttccaaagttacaggcgtgagctaccgtgcctagctcattttgaggcattctttggtctttgcttgagtctaattattagcaaattattcaagtactatattttatagttatggaatgcattgatattatagaaaacagaatatttagaaaagcataaagaagaaaataatatttgtgatctcataatctatgtgattttccccacaataataaaatattgcttttaacatgttaatattttgctctaaaccatttctcttcctgtttgaataatgggattcctatggtgttttcaattttgtagcacatattacatcttaaacattttttaatgccatcagaatagttcaaaagtataatattaatggcttcataatatttccttgtagttttacatttatttaattattctgataatcatggaaattttatttcattttagttgcatcattacttttgaagtaaatttaaataacacattaaaaataccaagaattttacatttttattaatagccaaaagatcatctgttgtataaacagatcccaaaacttagggttttcttgattaaggaaaacagaaggccaacaaagtccatgcagtacacacaagatatagtcaattaacacttaaatctgaaggaaacaattccagtgcatggtttcttgcactgggcttgttctctttctttttgattctcccttctggtcctcactgggagtaggaatcacacaaagagcttggctcactactttcattcactctctccttctctcatcatttgttcaaaatgaacccatttgggctagttctttaatactctcagatgttttcctgctttcagaaacaggcacaaaataatttatatattaacattgaacaactctctgaaaatcattgcattgtttaactaatttctgatttttctaccactttacagcagaaaacaactttcttcttagagttcttgatacaaactttttaagaaatttaaaatatacattaaaatctgtctttgatgagcatactaaataatatgatagctggaagggaggtaaggaagtggtaacagttttaaagttcttatttatttttcaaatatgaatagttacaggtttgttattatctaagaaagagaattattaatattctccatgagatccaaggatcacattatatctcaaaccaaggtaacattagagtgtgaaaaacaattttaattattattttatcaattttaaaaatttttgtatatttgtggggtacaagtgcaattttgctacattgatatattgcattttggtgaagttacggccttcagtgcatccatcactggagcaatgtgcattgtatccaccaagcaacctcctatcatccacccaccttgcacctactacccttccaagtctccattgtgttttatcttaaagtgtagtaattcttgccctctagcaataaccttggtgtatgcatctaattctcagagggtaatctacaatttcaaaactttaaaagtagctgtttaaaattatagcacacctgttattttatatttatgattagtatatatatcggttgttcaagctaaaagacaaatgacaggaaacattttaatcaatagcattcttttagctattatggtaatattcatatttattgggacttagagtaaaacagtcaggaagttggtcagagcaagaaataattttctcattcttttttcatttactagtcattcatttaacaatatgtattgagaacctagtatatttaatactaggtgccaagatatctactcttaagtacttagattctaaatttaaaaaaaagccaagtactactgttttaaccacaccacttctgacatcaaatatgtgggtcgttttgtttttgtttttgtttctgtttttccctcaccactcaattgtctgacagccagttgagtgtcccacaattcaattcaataataacttggcattatcctcagataccacaagtcaatggctcagtctcacaaaactgccccacttcaaacatcagttgcaagacccaggcctctggaacttctgactgaccagctataaatcctccagttcaataatgtgctacaacagctcacagaatttaagagcttactatttccagtttattgtaaaggaacagcctggaagagacatatagcagaaagtatagggtaggagaagctatccaaactccataatttagagtttttatggaggtctcattatgtaggcataattgattaaatcattgaccattggtgattagcttaatcttcaacccctagcccatcccttgcagatgcaggtctttctagtgactagcctcaatcctgaagctatgtaggggccctcagccacttgtcatctcattagcatacaaaaaggcactccagagattctaaagattatagaagctcttatgtcagaaaatggaactaaggccaaatataagaaagatgctgctatcaccaatattaatcaggaaataacaagggttataggagctctgtgccaggcagcaagaactaagaccaaatacaggcacacctcagagatattacacatttggttccagcccaccacaaaaaagccaatattgcaataaagtgagtcacacaagtgttttgatttcccagtgcatataaaagttatgtttacaccatactatagtctattaggtatgtgatagtattatgttgaaaaaaagtgcataccttaatttaaaaatgctttattgctaaaaaatgctaacagtcatctgagccttcagtgagtcatataatctttttgctggtggagagtctcgctttgatgttgatggatgctgactgatcagggtggtagttgctgaaggttgagatgactgtgacaatttcttacaataaaacaacaatgaagtttgccacgttgattgatcttcctttcacaaaagattcctctgtagcatgtgatgctgtttgatagcattttacccacagtataacttgtttcaaaattggagtcaatgctttcaagccctgccactgctttatcaaataaatttatgtaatatctaaatccttttttgtcatttcaacaatgtcctcagcatcttcaccaggagtaggttctatttcaagaaatcactttctttgctcgtctataagaagcaactcctcctctcttaaggttttatcatgacattgcagcaattcagtcacatcttcaggctgcattctaattctagttctcttgctatttctgccacatttacagttacttcttccactgaatcttgtacccctcaaagtcatccatgaaagttggaatcgatttcttccaaactcctgttcatatggatatttttacctcctcccatgaattacaaatgttcttaatgggatctaggatggtgaattttatccagatgattttcaatttactttgctcagatccatcagaggaatcactctctatagcagctatagtcttataaaatgtatgtcttaaataataagacttgaaaataaaaattattcctcaatccatgagctgcagagtgcgtgttgtgctatcaggcatgaaaataacattaatctccttgtacatctccatcagagctctttgcaacattgtcagtcagcggtaatattttgaatggaatcttttttttttttctgagcagtaggtctcaatagcaggcttaaaacattcaataaagcatgctgtaaacagatgtgctgccattcaggctttgctgttctacttatagagcacaggcagagtatatttagcatacttcttaagggccctaggatttttttgactagtaaatgaaaattggcttcaacttaaagtcactggtgacattagctcctaacaagagactgaacctattctgtgaagctttaaagccaagcattgacttctcctctctagctatgaaagtcctagatggcatcttcttttaatataaggctgtttcatctatattgaaaatctgttgtttagtgtagtcaccttcatcaatgattgtattagtctgttctcaccctactaataaagacatacccgagactggctaatttataaaggaaagcagtttaacggactcacagttccacatggctagggaggcctcaaacaatcatggtggaagatgaaggaggagcaaagggatgttttacatggtggcaggcaaagaaagtttgtgtagagcaactcccctttataaaaccatcagatctcctgagacttattcactaccacaagatcagcatgagaaggacctgcccccatgattcaattacctcccactgggttcctcccatgacatgtgggaattatgggagctacaattcaagatgagatttgggtggggacatagccaaaccatatcaatgatcttagctagatcttctggataacttgctgcagcttctacaccagtacctactgcttaaccttgcactttaattttatggaggcagcttctttccttaaacctcataaaccaaactctgctaacttcaaacttttcttctgtagctttcttacctctctcagccttcacagagttcaagagagttagagccttgctctgaattaggctttggctcaagggaatgttatggctggttcaatcttttgttcagactttcttcatatcagcaataaagccattttactttcttatcatttttgtgttcactggagtagcacttttaatttccttcaagaatatttaagaatatttctttttcattcacaactcggctaactgtttggttcatgaggcctagcatttggcctatctaggtttcaacatgtcttcctcacaaagcttaattatttctagcttttaatttaaagtgagaaacattcaattcttcctttgacttgaacacttaaaggccattgtagggattaaaaaaaaattttttttatttgtatggctacatagtaggtgtatacctttatgggttacatgagatgttttgatacaggcgtatcatatgcaataatcacatgagagtaaatggggtatgtgtcccctcaagcatttatcattactttgtgttacaaacattccaattatactcttttagctatttttcaatatagaataaattattgttgactgtgataactgttgtgttactagatcttattctatttaactacatttctggatcttattctatctaactacatttttatacccattaatcattcccacctccccaccacccacatagtagggttattgattggaataatttcaatattcttgtgtctcaaggaactgggaagcccaaggagaggaagagagacgggaacagcatgttggtggagcagtcagagcagacgtaacaccaattaagttcactcttatttgggtgcagttcttgccatccccaagcaattactaaagtgacattaaatattactgatcacaggtcaccataacagatataataatagtgaaaaagtttgaaatattgcaagaattaccaaaatgtgacacagatacacgaagtgagcacatgctgttggaaaaatggcaccaaaattgacttgctggatgtagggttgccacaaactttcaatttgtgaaaaactgtatctgtgaagcacaataaagcaaagtacaatatgtcaaggtatgtatgtatatacttcttatgataagaccacaccaagtatataaaatattttctaaagatggcacttgttacttctttgagactctcaatgtgttgcatactatgtttaagcttcaaattactgatcttaaggaaatcaatgttcttatctatctgtactgttatcttgatgtaaattcagtagtgtacctagttagtcagagtaggatccaaaattccaacctaaattttgaaacaaagatttttctttattataacgcccaacataacaccaagagtagttaataaacatactaagatgaacaattattcttgactttaggcaaaaagaaaattactaaaagatgtatttattaatcaaatgctgtaatttttgttattatttctgtaaagttctaaactccttgaaatcctatagaagagaaaagaataaaaaattgtcaaggcattctgattcaaacagaaaaagaagggaatcaaataattatcactgcttacatgattatcattgtagttttagctccttgttagttcagtgcttttttgtatatttatagagttgtgcagcaatcattacaatctcattttagaacatttccattgagctaaaaagaaacttgatgcccacttgtagtcactctctattcccactcccagtcctaggcaatcactatttgctgtctctgtacatttgcttattctagacattttatatgaatagaatcatgcaatgtgtcatcttttgtgactttcttctttcacttaacataatatctttgagattcactcacctaacagcatgtttcagtattcattcattttaattgaccaatcatactcccttatatggatataccacattttgtttatccatttaccagctaatggacatttgggtgctttccacttttgggctattgttaataaggctgctatgaacatgtccatataagtcttcatatggatacatgttttcatttaccttgattagatacctaggaatgaaattactgggtcatataatgaatctatgtttaacattgtaagacactgccagtgtatttccaaatggctgtaccattttacattcctactaacaatatatgagggttccagtttctctatatccttcccaacacttgtgattatctgttttttttattattattatagtcattccagtgtgtgtgacgtgatgtctcattgggttttttatttgcatttccttcatgattaatgatgttgagcatctgatgtgctcgttgattagtcatttatcttctttggacaagtatctacccaaatcttctgcctatttttatagttaggttctttggggttttttattattgacttgtaagagttttaaaatatatatatatatgccagatacaatcgcttatcagatatatgatttgcaaatacgttctttcaatctgtgggttgtcttcattttttgatgttgtcttttgaagggcaaatgattttttatgaagtacaatttatcaatgttctcttttgaccacttatgcatttggtgttgcagccaagaaattattaccttatgtatgtgcaccatatttactcatatttttaaagaattatagttttagttcttacgtttaaatttatgattaattttgaattaatctttgtacattgttatccacagtttcaaatccttccttttgcatgtggatatctggtttttctagtactagttgctgaaatgattattctttcccaattaaattatgttagcacccaaagctgaattgataaaaattgttagccaagttgtgttctcttcttatttattcaagaatggttcagaataagaactattgctactttacatgtgtcagatatctaaatattaagaaaagtatgtgatcactataaaattcatactttccagtaaattacatttaccatacaatgttcaatactgtaacatattctgtattttaacttttgatttttttttataactgttgaattttgaactatcgtgttttgtaacctctcactcttaggtgttgttattccaaatattttattaattaattcagcaactattgtgtgactgttatgggtaaagtactttgcacgatacagtgaagaatgcaaaggtaaatgctgctctcaaggtgcttatggactaaagcaaaaaacaagacatattcacaagcaaatatactgggaggtagaagtcagtcgtcaagtaacaccagagttgcagataaatgcttatgtgaattcgaagattacttgctttttgtttcagaaaagtgctagtggatgaagagatcaacagcctatatgacagcaaatttggttccatgttggtctatacaagtagttaagggcaaagaataagcagtaagtttctgatgaatataaataaaatgtatgtagctgttaagaagtatagtctgtgattttaaaaaaacatgaataatgatattcatgtacaagacatgacagttaccagtgtattgcctcttagctctctttggtagctaaccagaaatagtgtattgggcacttaaagcatttttcttagaccgtgagcataacgttactctttgtcagtagagggcagtgaagggtcactgcaggaggaaggggcttctcttcctggttctaatgctacattttgattttacttcgatcattagcaatgtggaccattagcaatggaccattggcaacgtgcttgtgtaatgacatctggtggtgtttttccccagccacatgcccagatggggcagtctgttggtgacttcacagcctctatataagggcctagtgaccactttgccacagttctcccagcactgacaccgcacactgccaacacagacacatcctcacttcagtgccgcactccttctgaaggcccacccaccaaccttagctcacctgtgccctaaagaattgtttctgcttgcccaacagtagcccaactgtggaccagagctccggccaggacaccccagcaaactattctgctgtagagaaagagggcttccaccacacttttcccaatgaagtttggaccccaaccttgggatgggaaatccttccagttcactcttctttgagtcctctaccttagctccaggataccctttagattctcttacatctttatggttactctcctatcagtacttaataattcttcatatattaaactttctctgtttaaattagcatgtggtttctgtatctttttttgtttgtttttgtttttgttttgagacggagtctcgctctatcgcccaggctggagcacagtggcgcaatctgggctcactgcaagctccgctttccaggttcacgccattctcctgccttagcctcctgagtagctgggactacaggcacttgccacccagcccggctcattttttgtatttttagtagagacgggttttcaccgtgttagccaggatggtctcgatctcctgacctcgtgatccacccgcctcggcctcccaaagtgctgggattacaggcgtgagccaccgcgcccggcccggtttctgtatcttgattgtgtcccagactgatacctgttgccacaagttattttgctcagttaatattactgattttcaaatgcttcagtttataggggtaaagacaatttcttgatgctatccctgaaaaggaattggacaagtttaacttatgtcatcttctcatgggcttcatggaaaatagcctttttcactagtgaatattggatatgctctagcatttccactgagaaataaaaattaggcattcattcaaaaaagtgtgtttgatcctatttctaattcaaatgctttgattattattgagttattcatatagtagattttctaaggattaattgtttttggccaagataaaccaaatgtggtagatgtaaactattttcatatggtcaaatacgtgatgattattttaatataaagggtttcactgaagcataactacaatgtaaagggtttcactgaagcataactacatatgtagaagttttaatgtgtatgaggtctgtaattcataaaattgttggttgattctttctgtttcacttctattggcaaaggtttaatttacattcaggcctggtggtaaccctgttaataaccaaattcattctctcattttaaacttataacttggcaaaagggaaacccttgatgaagttgtttttaaacttttatgaatgattctttttaacctttttaaactctgaaaccttttaaaagtgaaaatattcatcactttctaaagagtatccactttgtaaggtccaggtacagcaagcaaatatgtataaaacattaaattaagaaaacttcacactttttcctctatagcaaaaatcctaaggagtaagacatatgatataagctatttcccctaggacttcactgaggttatttgaaacatatcagaagctgagaaattacgtcatttcttttgctatttttattccttgaggaaataacttttttcaggaccatgataccaattcttttcttctttacaagcattcctgtgctttcttacaacagcatactggcaacacaaagtagccaaatcggctctaagacaaatgtctgtgaaggctgttggctgagaaatatcatttggcggtctcatagtctcatatataaaatgtaccttaatttttttatttttttgagacaagatctggctctgtcacgcaggttggagtgcagtggtgccaccttggctcatgcagcctccacttcccaggctcaagcaatccccccacctcagccttccaagtagctggaactacacaaacgcaccaccatgcctggttaatttttgtattttttgtagagacggggttttgccatgttgcccaggctggtgtcgagcttgtgagctcaagcaatacacctgcctcagccttccaaagtgatgggattacagatgtgagccaccatgcccagccccatttactttttaaaccaccacaatcattattatatcgtagcactctaggttcacagaggtgattagggacaactatgttggtaagtcaatgaactctcttctgttcttaccttactagattatgctgtaacattagacaatgttcatcattatctctttcttactctctcttccctgttacttcttctagaaaatgggtctttgtttgtattctgcaaagattaaagttgaattctaacaatgaaagcattcattttgactaaactctagttccataatttttcttagaaagtattggcaaatctgtttatgtctcttttcaattatttttcctactatctctatataccaccaataaaattaactaactaaatttagttttatttcaaatcactcagtggttcttttattcaaaagatattaataagcatagtgtcaggcactatgccatgaacagagatacatttccaggaaattgatataatggaaagaaactagggctagagtcagacaaatcagctctagctatacactgctctagctatacacagtatcactttaattagctacattttttctgacttttattgcttcatctgtaaaatagtgataataatatatattttcacgttgtatggtaaagtctaaagttatgttcaccaatacataatgcagttcttggcactgggtagatgcttttaaacactattagtgttctttatggtattttttctaagtgactaaaagatcatattaattttacatgcctcacatgtcctcagtcctttacctttatcttcctggtgaatttccttttattttacaaaacccatttcagctctcacctacttaggaagcttctcttaacatttttccccctcctcatatcccaaaagaagtgattatatcctcttctgtgcttcctccgtgtctcaaagataacttattgttatacttcctcagtatttatttatttatttatttatttatttatttatttatttatttaagacagagtcttgctttgtcacccaggctggagtgcagcggtgcgaactcggctcactgcaacctccacctcccgggttcaagtgattctcctgcctcagtctcccgagtagctgggaccacaggtgcctgccaccatgcccggctaaattttgtgttttcagtaaagaccaggttttgccatgttggccagactggtcttgagctcctggcctcaggtgatccgccctccttggcttcccaaagtgctgggattacaggcgtgagccaccgcgcccagcctacttcctcaatattataatatattgctattcaactgtgtctggcctaacagactgtctgctcctctagaacagaaaccgtcatatatatatatatatatctcccaaatctaaagtcaggcttgaaatctaataggcagctcaaaaacaatttattcttaaacagaattgaacaatgccttaaggtacaaaagttgtgcattatccacaaaatagctcgaatattactgaaactttgttgaatggtattttctctgaagcacccatgttgcttcaaaggacatgcttttgttcttatttatggctgtgtaatgttccctagcatatatgtaccacattttctttatccagtcagccattaatggacatctaggttgattgcatgccattgctattgtgaatagtgctgcaatgaacatatgcgtgcatgtgtctttttggtagaatgatttatagtcctttggatatatacccagtattgggattgctgggtcaaatggtagttctgttttcatttattctgagaaatcttcaaactgccttccacagtggctgaactaatatccattctcaccaccagtgtataagtgttcccttttccccacaaccttgccaacatctgttattttctgactttttttttttcttttttttcttttttttttttttgagatgtaatcttactctgtcgcccaggctggaatggagtgctgtggagcgatctcggctcactccaagctccgcctcctgggttcacgccattctcctgcctcagcctcctgagtagctgggactacaggcgcccaccaccacacccggctaattttttgtatttttagtagaaatggggtttcaccgtgttagtcaggatggtctcgatatcctgacctcgtgatccgcccgcctcaacctcccaaagtgctgggattgcaggcgcgagtcaccgcgccccgcccatgactttttaaaaattgtcattctgactggtgtgagatggtatctcattgtggttttgattttcatttctctaatgattcatgatgttgagcattttttcatatgcttgttggtcacgtgtatgtattcttttgagaactgtctttttaattctttgcccatttttaaatggggttgtttttcacttgttgatttatgtaagttccttatagatactggatattagaccttcatcatatgcatggtttgcaaatattttctcccattctgctggttgtctgtttactctattgatagttttgtttttgttgtgcagatgctctttattttaattaggtcccacttgtctatttttggttttgttgcaattgcttttggagactttgtcatgaaatctttgccaaggccttaatcgaggtatttcttagttttcttctagggtttagagttttaggtcttacatttaagtctttaatccatcttgaactgatttttgtatatggtgaaaggaaggggtccagtttcaatcttctgcgtatggttagccagttatcccagcacagtttatttaacagggagtcttttctgccttgcttgctattatcgattgtgttcaagatcagaacgtcgtatgtgtgtgactttatttctgggttctctcttctgtttcattggtctatgtgtctgtttttttttttttttaattatactttaagttttagggtacatgtgcacattgtgcaggttagttacatatgtatacatgtgccatgctggtgcgctgcacccactaactcgtcatccagcattaggtatatctcccaatgctatccctcccccctccccccaccccaccacagtccccagagtgtgatattccccttcctgtgtccatgtgatctcattgttcaattcccacctatgagtgagaatatgcggtgtttggttttttgttcttgcgatagtttacagagaatgatgatttccaattgcatccatgtccctacaaaggacatgaactcatcattttttatggctgcatagtattccatagtgtatatgtgccacattttcttaatccagtctatcattgttggacatttgggttggttccaagtctttgctattgtgaataatgccgcaataaacatacgtgtgcatgtgtctttatagcagcatgatttatagtcctttgggtatatacccagtaatgggatggctgggtcaaatggtatttctagttctagatccctgaggaatcgccacactgacttccacaatggttgaactagtttacagtcccaccaacagtgtaaaagtgttcctatttctccacatcctctccagcacctgttgtttcctgactttttaatgattgccattctaactggtgtgagatggtatctcattgtggttttgatttgcatttctctgatggccagtgatgatgagcattttttcatgtgttttttggctgcataaatgtcttcttttgagaagtgtctgttcatgtcctttgcccactttttgatggggttgtttttttcttgtaaatttgtttgagttcattgtagattctggatattagccctttgtcagatgagtaggttgtgaaaattttctcccattttgtaggttgcctgttcactctgatggtagttcttttgctgtgcagaagctctttagtttaattagatcccatttgtcaattttgtcttttgttgccattgcttttggtgttttggacatgaggtccttgcccatgcctatgtcctgaatggtaatgcctaggttttcttctagggtttttatggttttaggtctaacgtttaaatctttaatccatcttgaattgatttttgtataaggtgtaaggaagggatccagtttcagctttctacatatggctagccagttttcccagcaccatttattaaatagggaatcctttccccattgcttgtttttctcaggtttgtcaaagatcagatggttgtagatatgtggcgttatttctgagggctctgttctgttccattgatctatatctctgttttggtaccagtaccatgctgtttgggttactgtagccttgtagtatagtttgaagtcaggtagtgtgatgcctccagctttgttcttttggcttaggattgccttggcgatgcgggctcttttttggttccatatgaactttaaagtagttttttccaattctgtgaagaaaggcattggtagcttgatggggatggcattgaatctgtaaattaccttgggcagtatggccattttcacgatattgattcttcccacccatgagcatggaatgttcttccatttgtttgtatcctcttttatttccttgagcagtggtttgtagttctccttgaagaggtccttcacatcccttgtaagttggattcctaggtattttattctctttgaagcaattgtgaatgggagttcactcatgatttggctctctgtttgtctgttgttggtgtataagaatgcttgtgatttttgtacattgattttgtatcctgagactttgctgaagttgcttatcagcttaaggagattttgggctgagacaatggggttttctagatatacaatcatgtcgtctgcaaacagggacaatttgacttcctcttttcctaattgaataccctttatttccttctcctgcctaattgccctggccagaacttccaacactatgttgaataggagtggtgagagagggcatccctgccttgtgcccgttttcaaagggaatgcttccagtttttgcccattcagtatgatattggctgtgggtttgtcatagatagctcttattattttgagatacgtcccatcaatacctaatttattgagagtttttagcatgaagggttgttgaattttgtcaaaggctttttctgcatctattgagataatcatgtggtttttgtctttggctctgtttatatgctggattacatttattgatttgcgtatattgaaccagccttgcatcccagggatgaagcccacttgattgtggtggataagctgtttttgtgccagtactatgctgttttggttactgtagacttgtattatagttgggtggtgtgatgcctcagacattgttctttttgtttaggattgctttggctagtcaggatctttttgggttttatatgaattttcaaatagtttttctaattctgtgaaaaatgacattggtagtttgatagaaatagcattgaatctgtaaattgctttgggtggcatagtcattttaacaatattaattcttcctacccatgagcatggaatgtttttctatttgtgtgtgccatctctgatttctttcatcagtgtttcataattcttgttgtagagatctttcatctccctggttagctgtgttactaggtattttatacttttcgtggctatcgtgaatgagattgcattattgacttggctctcagcttggatgttattggtgtatggaaatgctactgatttttgtacattaatttttcatcctgaaactttcctgaagttgtttatttgatctaggagcctttgggaagagactgtggggttttgttttctaggtataaaatcatatcattttcaaagagagatagtttgacttcctctcttcgtatttggatgccttttatttctttctcctgcctggttgctctggctaggacttccagcattatgttgagtaggagtggtaagagtgagcacccttgtttcgtttcagttcttagggagaatgctttcatcttttgcctcctcagtatgatgttggctgtgagttggttatagatggctcttatgctttggcctaatttgttgagggtttttaacatgaagagatgttgaattttattgaaagccttttccgcatcttaattaagatgatcatgtggttttttgtttttagttctgtttatgtgatgaatcacatctattgatatgtatatgttgaaccaaccttgcatcctaggaataaagcctacttgatcatggtggattagctttttggatgtgctgctgggttcaatttgctagtattttgttgaggatttttgtgtctatattcatcagggatgttagcttaaagttttcttttttcattgtgtctctgccagattttgatagacagatagatatttcttgtgaattgttacaaatgcaagagaagaaaacttcatccaaacaaggcagattgcatacaaatatttctacaatgacctctatttatctagataaaagttttctaattctacaagactctagaatacaacttcaaatagaggctaggtgtgatagctcatgcctgtaatcccagaaatttgggagaccaaggtggaaggattgcttgaagctagtagttcaagatccacctaggcagcaaagtgagaccctgtccctacaaaatatttttaaaaattagctggtcaggtgatacacatctgtactccaagctactgaggaggctgaggaagggatcacttgagcccagtagttcaaggctgcagtgagctatgatcatgccactgcacgccagcctgggtgacagggcaagaccctatttttttttaattgaatacaagtacctttgaacataccaaatataattttatatctcttatttcaaagtgaagtctagataatctcacgtataagcatttttttaaacatatagcagatctctagagatggtgtttatctgattttcaaaccctggcatttagaaaaaacaaattaataaagactaaaggatgaggtaggcattgagatttctagaactattaataggtttccccttctaggaaggaaggtgaaaaaagtttcaaaaatagaaacgaagtgtaatcactgtacatttgtaaattgttaaaaaagaaaacattggaaggccaaggcgggcagattgcttgagctcacgagttcaagaccagcctgggtgacatggtggaaccctgtgtctactaaaatacaaaaaattagccaggtgtggtggcatgcacctgtagtcccagctacttgggaggctaagccaggagaattgcttgaacctgggagagttaggttgcagtgagccgcgatcatgccactgcactacagcccgggcaacagagcctgaccccgtctccaaaaacacaaaaacaaaaacaaaaaaaacacacacaaagaagaaagaagtatatagtattttagatttacatcactaatggtgaacacttagagtgttttgttaagtctagtggtaaactttatgaaagggcaaatttggaggtctagatttcagaaaagtgattgaagaactttaggactttcatcttaactcagtatcttcaaatttcaataaaaacaaaacaaaaacaacaaaaagtcacacatatattaaaattaatagtcacctagaatagcatagaataaaattactatgaccttgtgaaaagaaattgtcagatcaatgtaattttcttttgagttgaagcaaaatgtcatgttgatcaagaaaaaaataatggataccacttatctgtgctttaagaaggtatttgcatatctatacatgtatatgttcttataaaaaacatgatctctcaggctgggcgcagtggctcacgcctgtaatcccagcactttgggaggccgaggtgggtggatcacgaggtcaggagttcaagaccagcctggccaacatggtgaaaccctgtctctactaaaaatacaaaaattagctgggtgtggtggtgggtgcctgtaatcccagctactcgggaagctgaagcagagaattgtttgaaccagggaggcggagcttgcagtgagccgaattcacaccactgcactccagcctgggcgacagagcgagactctgtaacaacaaccaaaaaaaaaagtgatttttcatccctgatttccaactttcatatcagaattatggactaccatatgaatgaaagaaattgaactttcagtgtcagttgatagtaacaatagacattgactctcaaaagtcttctgtggagtcaataactctttgagagaatttgcattttattaaatacttacatttgtataatttaaaaagaatatagtgtgaatgtttgtaagacatgtatttaacatgaatccaaaactggagtgggacattatgaattcttgaaaactttagaataaatctgggcctaattttctgcaattattcatctgtatcatattgcttttaggggagggttcaagtggttcaaggtaagtaatgatgattttatgacatcctggaaaaatatattaattaccatttatctaaattaatctaaagactattaccatttaatagtttttcatgctgggtattgacattaaatataaattttaagtgaaactgatattaatagctctgaggaatgtataaataggaaacagaataaccttgaaacctttaggaattggcccatcaaggcaagtgagactctagtgtcaagtttggttagcgtgtagtatattttgaaccaagaacaaactatacaaataacaggatggcagagaagctaattagtcacaaatttggtagaaccaataaggctcttttatttaacaggcatcgttgtttctgattgatagcaggaagaacaggagaatcatgggatcatgggatatttttatatttaaagatcagttttattgtttcaatccccctttgttaaaatgtcaaactggcttgtacaatgacaaaggctaaataaaggtattatattactaaaaaacttgacacagtaattcgtactaagggaaatgtatacaaaaatcagacatcatctttttactgttcttatcaccattattctattacagtttctaccctaaggagattagtgaagttgggcagaaattagaagggagcaaaagaggaatacaaataattatatcatacctatgggttaaaatattgaaaatttttcagcttggaaaagagaaaactaaagagagacataataactgccttcaattgtatggaggtttgtcacaaggagggtacgtaattgaatttttatccctatggaaagataaatcatttaaaatgggtataaactgtagcaatggggagcttatttgtttgttttctatttccaaaaattatttgatctgacttacaaaatcaaatacaatataaagcagaataataaagaccaaatgatctaaaaggagtggtgaaatagatgttgccaaattcagaagtgtaactgcaatttttgtttgatcctgattttggcattgtgtttttaacagctgaaggggaagggtaggagcacatggagggttacatagatagatcccatagactacacaggaaaggagcacactgcccatctctgatagccctgtaccctcaagagtataactgagcatcgttgaagtttaataggtcctttggtgtttggttgtttggttgattggtatttaatgatcttttgttgttgttaaattctattctactccatgcgtagcaactaaattattagaagatgaaactgctagtaagatgccaactgaatagaactttctggtatttttatcatatccaacttattttctgcatttggccctactttgaaacatctaaaatgctagatatttttatactaagattctttgaattttggagtgcaacattcagaatgttattccttatttctgccaagagattatataatgacatataaaactgtgactttatgtggaaaataaatttgactcaatttaatattctgggcacaacttactatcaactacactaaaacttgttctgtctggcagatattctctggggtctaaattgatcatttaaaaggacactttcaaccactcaactcattaagtggctcagtgattctgtttgcaagtagtccattccaacacgtctatcagtatacaattctcaaaattagtcgttctccaagggtcattccttgttttctcatttaatatttaaggtgtaataataatggctttctttttttcttatcagatgttttatccatccttcataacatagatctctggtatcccaacttggtatttgtccaagtacttgaaataatgttaaagatcatttttgtgtgtgtgtgtgtgtgaaagatttgaccgataaggattcttttagctattttcatgaaaaagtggaatgactcagtttctcaatgtgaaaacatattggggtcataagtgtttctaatgaaatatcagtcttgctgcctgaatttctggttttaaaacaagagcattgaactgtgaaagattagacccggatttaaatctcaaacttcctccaaactgtctgacaatggtcatcactttattaacttgtgctatttaactttgctgaacctccatttttttcttttgttttaaaacaaaagttaagaacatgttatgttcagtgtttttacattgtgcttttgtcagaacacttgtattcaaaacataaaggcacatttaagcgggtataagtaaaatggtttatttattataagaattcaggccatgcatggtggctcacgcctgtaatcccagcactttgggaggccgaggcgggtggatcgtgaggtcaggaggttgagaccatcctagctaacacggtgaaaccccatctctgctaaaaataaaaataaaaaaattagctgggcgtggtggcaggcaactgtagtcccagctactcaggaggttgaggcaggagaatggcgtgaacctgggaggtggagcttgcagtgagcccagatcacgccactgcactccagcctgggcgacagagtgagactccatctcaaaggaaaaaaaaaaagaagaattcaactgaaaatcccataggccaaaacccaagtaagccataaagagattaaactggaatgagaagtccagaaacatatcaacacagcctacattctttctgaatgcttgcatggctactgttatttctgttttttttttctgctttggccgatatcctctgcttggtcatggccagacatagcttcctcatcctcaactctaggtcatgcagtgcatcttctcataacattctgactcactcactcttacttcatttaaacatcacccagaaagcaaattctattgtttcagttaagcctatagatgagtgccccgtgatcagcgtcctcataaaacctaccaagctgtggccatgggaaaggggtgaaagagtcacatggtataaacatagtttatactttcagtatgggttacatggaggacaatttcaaaaaaggagtgagggctgagttggcacctatcatgtgttattataaaaattattcccattttataaatgatagaattgaagctaagcaaggccaaggtactattttaatatcacagttttgttaaggactacaaccaaattttgaacctgactattcttattctaagtttaatgatcttatcacaaaacttacctggttgagaaaataaatctccatgtaagaaatgattttttcctacctgagcatggtggctcatgcctttaatcccagtgactcccgatgctgaggcagaaggatcacttgaggccaggagttcaagactagcctaggcaacatagcgagacctcatctgtacgaaacaattaaaaataaacccaaaagatatgacctgttctaacatttaaattaattgaattatggatgcatctttaatcaacaaaccaatacctgcatgaatcgactcagtcccttaggtaccaaaagcttgcttttttatatttgtaatggatgcttttcctagaccattctctaaaacagtgtttctcaaaatttgcccattcattaactatgagtgctacatcctgatcacctggacaagcagtttaaacacagattctaggtccaccttagatctctgaaacaaaatcttgaggtgggaccttggactatgtgttttcaaaaagatctccacatgatttttatgaatgcaatggtctatattttcaaagtgtagtctctactagataaacagaaagcaatatgccatattatttaagttctccacaaagacgccttcgcttaattaaaatttggtattacattcttggattttaaagaaaaaaatattatctgaatgaagctctaaacagttgttttatggctacatgttttagtttccttagtttgatgataacacttgtgttagaatgagatgggtgggaaggacagtgacatttgcccttcctatagcccgtgcactgagcaggtgacctaggataaggcattgatcatgaattcagttattcattcattcaaaaaaaaattactgagcacactgtggcaaacattttggtttcttcaatatgttgcatagaatgattatgcatacaattctagtggcgtggggaaagaaacattaagcacaagacgtttagttgatttcattattgcactaaagtatttgcctttttcaaggctgaagttgacttctctgccttcctgagccatagggaaaagggtcttgtcttgcttatgcagccagcaagatgtatcggtttaagaaaagtgctgagtaatgcctgcaaatatagcaggcagtcagcctcttctctgcagcttggttcatgtcctttacccatgctatttaacccctgatgtttttatatccctatttctaaactcaaaatgaacctcaaactgaataaggcatacaataaatgtatccatattttctttattcaattcagtagcatctaaatccctcttgtgaggaccctctgctttggtcattagatagttaaaaagatttaaaattgctatatgtctagtttctaaaaattgctaaatgattttctaaggtaaacacctttccgtgtatccagtgcttaacagaattaatgttatgtgagttttcaaaaaaaagaaaggaaaaaaaggaaatctcttttttgtctcagccgacagcaagcagtgctgctccggaaagaaatgattttatttctagcctctctgcagcatctccctaccgcattagtatgttgctgcaaagctatccattgtgtaactttccccatcagtcagtcagctgtgtagttctctttcctatgaaatcgttatgccacaggagacaaaaataaaaatacaatgcaggttagttcattatatcctgacatctgtttcatgcagattgtgatgcaataaaatattagtaatttaaacagaatgtaattgtggtttgaaatcacttgggtaaatcgtgttattttaaaacaaatcttaggaaaatgaaatttaaactttgcactatttgattaggattaacaaacaagaatatgaataaaccaatagatataaaatattagactttagtacttagaatatgttttaagagtttgcttctagtataagttttaattaacaattattcattagctgaaaatttttgaggacctattaagtacctatcactcttctgggtaccatgggaggtgaaaagggggtttaaagtttgtggcgaatgtatagtagttacattttatgagaaaatgtctcatacctagtgactggtaaagacaataaaggctgtagaccctggtgactagtgaagaacctatggcctggcttctgcttaaagagagctcaatgttgcaaaattcctatttgccctttcacttttgctagaagtgtattgcatcacttgtaagattaaagggaaaatatacttattttgtttcccaaaagtttataggtttctgactttcacaaatgcttaagagtactcttctctttgttgttatggctgtccacgtgtagcagtttcatctttagaagtttaaattcttttctctttcttgctggatacaatggctcatgcctgtcatcccagcaatttgggaggctgaggcaagaggatcacttgaggccaggagttcaagaccacctgggcaacatagagagatactgcctgtacgaaagtttaaaaatcagctgggcatgctggtatgcatcccagctactcaggagcctgaggtgtgagtatcactcggggccagaagtttgaggctacagtgagccatgatctcatcactgcactccagcctgtgtgacagggcaataccctatatcaaaaaaaaaaaaaaaaaaaaaaaaaaaaggaaagaaggaaggaaggaaggaagataatttctttggtttgtataggacctacggagttaaagcgaagtgataaaataaaggaggagtccttaatgtgcaaagatgcactactcatatatttgaggataatcttacatcaatacttttaataatgaaagaaatgtgaaaatatgcttgccactggttttaacatttaccatcatccatgtttgaaaaataaaacccaacactggttcctctcatgagtatttaattgttcaagaaaaatcctagaatgagtgagttttttctgtcagtaccaccttacactctctacccccattccatctttttatatagtctcttcctggcacattgataattcattccatcagaaaatccccactaaaagtaattcatccatatgtattcttccactgaaattaacaggtcccagccagccccatcccctacctagtcaaccaaaaaaagaactcttacgccctctctctgattgattaacccactttgacagtgagaaatgcattttacattgagaagtaagtagtctcattgatgcataaacgactcatgtactcccagagatacttgtcttttaaaaggaagcgcttgctaactgaactgaaaatgctaattaattgaatttcaggaagcaggaaaataatttttttagcagagaagactttcttcatatatagggctgctacatttggaaactaaacatacaaactgtccagttatatttgactttcagataaacaatgaataatgtttactagcagtgggccccaaatatagacaatgagaacacatggacacagggaagggaatatcacacactggggcctatcgaggggtgggggcctaggggagggataggagaaatactcaatgtagatgacaggttgatgggtgcagcaaaccaccaaggcacgtgtatacctatgtaacaaacctgcaagttctgcacgtgtatcccagaacttaaagtatagtaaatataaaacaaattgtatgaggtatgcttatgctttaagaaatcagttatctgaaattcaaatttaactgtgtggcatgtattttttctggcaaccctgttcagatatcttaaatcattatggtggttactcatatcctccatgtcataatgctgaccttgggtctccctacttccaatctgccagtccagcccctttggacatcactgtttcctttacgcaacactctacctagagaacaacaacagttgtcgcaacaaatcaagtactcttctaggccaacttggtaacattctaaaacaataatgccctacctagcccacgggctttgggactttactgggggtgaatgtagggtagcaggtgagatatatttgggaatttaaacaaaagaaaatataatttgagcataggctttagctgactgtaataatagtatttaaattatttataaggttttaacaaagcatataattgaacaatttcagctgccacctgctattgaggataacaaaaaggaaaattttctcagcacttaagaaatgttagaaaacatattgatatgaaagagtagaaatgaatccaaaaaagcatgcatttttttctttagcaatttttgttttaactatatctttttccagttcttcatcattgacacctgaaaataggcattggcaccacaaaaatggttagatggagagaatgcaggacatgcattgaactttatattccattgtcttacatgtttatcaacattcactttgatgtaccaaaactatctttaaatgagatgcacattttaatgtacatctagattagagaaaaatcactctggtctgataactttatgggattgtgaatacaagtgatgtgatgggtggttgaccaattattttaaaaatggtttagtgacaattcaagattgtgttgtagctcatacccttacacacacacacacacacacacacacacaaacacacagattgtgggattgacagagatgttcagttttcaaagtcaatgtttcagtgttcaacctccattttcttctactctgggacttaaaaaaatgaatctgttaaaatcaggaatacctaaatttccaagtaaagatccaagaagactaaagcctaaagtctatttcataaaggagcttctaaaatcaatttggttactttgcaggattctcaatattattattctctatttgccaacttcatagtctccacatctctaaccagtgccttgcacattgtctatattcaataaatattaaagaaatgaacaaaattgactgtatagaccatgtttcttagtccatttagtattgctataaaagaatatctgaggctgggtaatttttttttttaaaaagaggtttacttgacttatggttcttcagactgtacaagaagcatggcaccagaatcagcttctattgagggcctcaggtgacttcccctcatgacagaaggcaagggcagcctgtgtggggtagagaccacatggccagagaggaaacaagagacagggtggggtgccaggctttttttctgagatggagttttgctcttgttgcccaggctagagtgcaatggcatgctcttggctcaccgcaacctctccctcccagcttcccaggttcaagcgattctcctgcctcatcctcccaagtagctgggattataggcatgcaccaccatgcccagctaattttgtgtttttagtagagacagggtttctccacgttggttagcctggtctcaaactcccaacctcaggtgatccacccacctcagcctcccaaagtcctgggattacaggtgtgagccaccgtgccaggctgctctttttttttttttttcaaccagttctcatgagaactaacagagcaaggactcactcgttacagtgagaatgaggcaaaaaccattcatgagggatccacccatgacccaaacacttcccattaggccccacctccaacattaggaatcaaatttcaacatgagatttgatggcgacaaaccatatccaaagtatagcaccaagtatcatacacctagacagaaatagacttggctcaatgtcacatctgctgtgacagatgtgctggacatctggtagtgtccactctatacaaatctgtgataatcatcagctgctgagctctcaaacaagacgaaactgtataataatccctagagggtctctttaacccagaccagtataccacaaaaggaatatagtgagaatgactgaattcacatgacagactgaaagcaaacttaagtagacgtttatatgattatcacctgaagaatgatgaggttcataaatttggaaaggagagctttatttcttataaagggctgcagcctgcagagtgaccttctgacaggttgggaagcataacttccagccagaagccagaaacagacacttcaagggagggaaaaaggaaacagaaatttatgctaagcacggtggccaaatatatatgttcaataagttataggaggagtcatgaatatttatgagaggagaagcatgcacatcctcaactgagcttcatgcccctttgtgggatccatgtggaaaaaatggcgacattagcatgatccgagggtagagttttcggccctctgacattaaaaggtgaagcagaggacacaaaaatccttactgcacattctcagtggaatggctagaatcattccctagtgggtggtctcttatgaggcaccaatggagggaaagtgtcaggtggttggtccatgtcagtgggggagtcttttgaaagggctgatttctgtttagcccttagggaagaaagcctcatagtggttagtgagggaggggttataaggaggtatgtctgactccctgatccaccatggctgagaattcagtcttcaaggttactctgggatccttttggccaggagaaggtcaattcagtcagggggcttagaattttattttcagtttacatgataaattaagcataattttatatcataaatgataaataacatacagaaaatttaatatactgagtttctgaatcaggaaattatctctgcctttcatctttcaagacctattttctgtaagttctttcagctttctctataccaaaatggttcttctctgaacaataatccatagtaaccattgcagataatatgcctttgcttagacttgttctatgtctagattttatatatacagaatctgaaccaaatgaattctgcagctctgatacttctagtctcaatttttcataactcagggaggttccatttgtcttcaggttatttggaaaagtgaaagtgtcaaacacctgatactcattccccagggtagttaatttgtgctcaacactctcctctccccgttcctggatctgtttctctttcccctgcagtttttctctgcttcagccccgctgcccgtgggttctatgctgtatctctccatacagcaactatgcctggacagttttgctttgtgttgaggtggtttcataagaatgcttttgagcagaagagtatttttaaattgagtttatgctaaagagaaacccctctgagcagaattccacacagaattctgcaggatatttcctgcataacaccataaacatccttctggctgcagcagctcaagtatttctgttgaaccatttcacaccctgagctaactaacattcagagaatgaaaggtgaaagtcttaaaacataaattaaataactatgatttcttaataacactaatgactaaacattccacatagatcctaccaaaggagggtattgtatgtctcccaggaacagagtctaatcataccattgttgtgctggaacaccattgagtccaatagggatggcatcatggccaagagactaaagaagagacttgaagccagcaagggagacataggatttatctaggactcatatacaggggtggtccagtggcagtgggctggatgggagaaccactaatgtttgtaaaaagcatgcagtttatatagcattttcacttagcactctccacctagcaacattcatttaatccaaacaaagggcttcatccactgtatggcccacattctgaggaatggaccaggctttggaaatccttaataataaggagcaaatttccaggttggccacttccagccagatttcttacctcagacttccaaacacacattctttttagaccacagagtcattctcagggtacccttaaattattgctgtcaggtgcgtctgccatacaaccatgagtcctgaaaggatttgcacactgaaaacactgcattattttaccaaaatggttatcaaagtagatatttccaaagaaggaatgtaagcatccttcctcccaacccccaaccagcattttgtgttaaaatgctagtgttggcatctttttccttcaaagggaattgtaccaagcctgattttttctcccattattgccccacagcaataaaaagacaattgctgactcaggcactatttcctctggctgctacttatagctacataactcctggctttaccagcaccataggcaaaaatgacctgcattgtctgagagagcagcaagaagaatggcattcattctgtctccatctttgtgggtttacattaagttacttctagaccatggtttttgaatgaaatagaatggacttgaagtgtctacaaaggagaggcacagtccagagtgggaaggggtggggagaggacagcaacggaagtgagatggaggctgagcaaaaaaaaaaaaaaaaagaaaattgagaataaaggagagctgggagagaaaagatgaacatcgagaaaggggaagatgaatagactggccattaggctttctcttcgagtaatccactttgtgcaaaacctgccatatacaacttggatataggcagtgcctctctcattgctagctaaacagccctgggaggcccacactgggctttaagtgcctatcacctcacacttggtatctcaaaatctgcaaccacaatcacagtcacgaggattagacttcactctctacatcctcccaaatctctgtcgagtgaccactcacccacacaataagattacttattttctaacaggaaaactttactaaaagaggttaacttaaataatttacttacaatgacagtcattactatattcttgatataaactaatgacatttgttcaaaggaattcccttaaattattctgactatgatcgtctagaagagatcctaaatttcacatgatttattatgtgaactatccatggtcttactctttaatgacaatcttctctgtaaggaaaaaaatgaaattaatcatcctaatgatactgatgtgtttcatgagaaaactacaggcagagcctaataaactatggcagatctgaatctcaggcaaaaactatgtactgtatttctatgtattgtatgtagattgaatgaattttttgcctgagatctgaatctcaggcaaaaactatgtattgtatttctatgtattgtatgtagattgaatgaattttttacttcttagtttattattagggtgtcttgaaaaacacccctggagtatacaaatgtagatacagacatatgttagatatctgaccttattttaactgcagtttgcataaggcatgaaaaactaagggtagataatgaagttatttttaaatgtaaaagttttaaacatatggctgaaatatgttgttttagttaaccccaacctactaaaaattggcttattgagaaatcaaatgaaatatttttgtaattataattacaccaaatcaaattatttctagaaaagaaatttataaaacaatactttctaggtttgggatttctatgtaaaaaccaatttctttcttggctgctaaaaaatagttatgtgagatcacaacagtaagaataacattttacctagttatttttattattattggcagtaacattcttttgtaaagtaggtggcaagaacactacaaaacgaactgaaacacttcacaaattgtcgtgcccagatggtttatgtccccagaatagtaatagctctttacaaggagatggcaagcattttggcagaagtctttttggtttctcttcagtatggatattaaactactttatagacagaattgaagatatataatttttctccacatcagattatatattataaggtggtgaagatatataaatgttgcacaactatattgaactttggagttacagataaattatataaagtcatctgctcagttagtaactagaaataatccagtttagcaatacataaaacataacggaagtaaaacataaattgacggtggaggtatagttcagcaggattaaaacctgcatcatatgattctaaacttgaatattacaatcatctttttaaattttggagtctcccatttttcaaaattttgaagtctccatttttgccagaatgctttatttactgtatttgttttgggtctgtccaagtaatataaattccttggagagacctagatcaattagagtagataaatactattttaacacagctacttatattttcatatattttatttagctttaaaagaatatttcataactattaggacctggcagacactggtttgggagttagaaaataaaagttctgatttaagtcccaccattaataagctgcgtaacctgggacaaatgacatatttattttgaaagtaggaagcacataagttctaaacaaagaaattgcccatttttctttgattcagtttgttttctattaaatgagaggaatagactaatctctgttttttaaatctttgccatttattggttttgatttacttatctttgtctaattctcttaaaataacttactcaacctttcagaagtccagaggtcaaggtaaactaggtcttgtctgcctgaaagcctgtattatagactaacactgttccacatcaacaacaaaatactatcacattaagtactatatatattcttgtctgtgaataaaccataagagctgcactttatattcagttcactaatcaattggttagtaatttttttccctgtaaatcacttctagggtcagataaggcaaaaaaataatagcaattattctaatagatcataacaatagcattggaaactgggaggagaaaatgagagaattgtctcaccaggttgtagggagagacgggggagtgaggagggggaatttcttttaggctttaaaaacaacatagaatttaaggacattattgaaccaaaaaatctcaagacattaccttagttatggtatttcttgcataaatacacaatggcatcagagtgtgaagttgtggatgctgggtgtctctcggggatgggaaacactaaatttcattcatctttctcaggttctgaacaaagaaaaaatattcagaggactaagacagatatcacctttttatctcacagaagtttgtggagagtatagctttgtgtgaaagcccaaaagcccgttaaccaaacagatctaaccacagaggcccaagcagtcacacagagctgccctccaaaggaagaaactacataatgatttacttataaaaggccagtttcttcgggtacaaagcatttataaggttgcctttacagttaagacttctgtgtgaaatgccacagggaaaatgaaatacttcattgtgagctatcgtacatatttgtttgactggagaaaagcagatgcccaagggagtttaactgtaaggcttcatgggttaggattactttaaataaagctcctccatctgcactttgagggtcaccaaagccatatggtttaccactcccagtcacctcaagtataaacatcttttggctgtgataaatgcctcctcaagtccagaacgtaatacatgtgtcctcttctacgggaaacagagatatataatgcccagaagcaaaaacctcatctagtactagaacatttatgataagtaatgaattagtaaagtcttagaaatgacactgaatattatcagtattaactttctgatcttgtaaagtctcccgagaaggtaatctgttaattataatgctacagatttacctccctctttttctttcagttagatattaccagatgatattatatctttatttattatttgtatattctaacaaatttttccttataattcttttgtccacgttatttgatattggtcatgttattgctattactttactatttctttccactcaaaatttccacttcattttcttacaatcttttttttcccccatgatctctcacttccatttcatgttcttttggattatttttttcctgtcttctttaggattgcttatctaattgaattccacttttaatgtatttttcttgtcttccaaagaatcattcttcttccagttttctattgcccactactctacttatttccaatattttttaaaattccttcagatttgaagtttgctaacatgcactttgttactttttcttcctagctatggtttcttagttctcttcttaattttattttgtccaaatgcataaccataatcatcttgaaaaggcctctctctttgaagtcttctcttgttaggaaagtttcattgtcttacctcttttgaaaggagcaaggtctcctctatgtaaccaaatatttaaatgctggtttttatgaaaagagaaagctgtaagccaaaactgcagattctatgaggttactaccccgtatctagtgacatgtattttcataaattaggacaattaagtcttctgttataaatttttagaataaagaggtgaaatctcctttgtaagtgtaaatggaaaattcatgatttatttctgtattttaatagaataagtacagatttcaaatgtaatttagaacaatttttcatattactaaaaaatattaatattgaatgacatctgacagttttttaggtatttcataattaaccttatgagatttttaatgagttttattcttataattaatataacataatttatttttaggtagcatttgaatagaagatctacttagagttaaaaaaatactttttctagtatcagtatgatttcattataatatgggttatattgcttacatatgaatataattcctgtatctaactaatttataattatatataatacgtttgaactgatcatatttgtcagtgtagaattcatgtcttctactttcttggttgtttatttctccagtaaatgatagctagtgaccagggagattttctttagagagcttttctcaaatgcagtatttctggagaataggaaggcttttagtaactgtttctgtccattcacacaacttcatggacaataacatcaagtgtggcactctgaaagacggtgattgtcgtaatgatcacatatgttaaaatatacctatatatgatatctaaacatatacatattaaggaaagtgctaaaacagtaaaatgaaaaggatgaaaccgaattgatggaaaaagacatactagataagtgcaaataagtagaaattaaagtcattatatgctatgagacaaagttgtctttaaagggaagaaactacagtaagataaacaagggccatttaaggaagtacagggttcaattcactccaaagatctgatcataagtgttatctacacatcaaacaataccgcattggaattcatagaacaaaaatgacagaaaccacaataaataaaaacacattaaatagacattaatttgcctctcccaacttggaacagtcaagtagaaaaaaaatatgtacagacatagaaggtctacataagataagaaataagatcaatataattgaggcataatgaactctactgctttaaaataaagaataagtttctttttaatgttcttagaaaagtcattttaaaaacaacctctattaggataaaaataaatcacaataaattccaagaaacagaaatggtacgaactacattatcagagcatagggtaataaaactaaacataaatttaaaacttagaaggaaaatctatcatttgaaaaatttaaacactttcttttaaatagttcttgcatcagtgaggactttgaaaccaaaattcattttaagaattttctggttattcttgtttgcttatttttccacatgaagtctcaaatagatttctctagttatatgaattttgtgattatttttcaaaggctgcatttaatttattaatttagggaaaattaatatctttatgatatagcattcctatctaataataggatataactttccatccatttatatttacttttggtttattcaaagcttttaaaaaatgcttacattgtatttagaaacatttcttccattgtactttttctctttgaaatagactagttttacagtagttttagattcacagcaaaattaagccaaaaatatagagtttcccctttctctacacacgcagagcctcccccaactatcaatatctcgcaccagagtagcacatatgtattactgtaaaaataatctatttagaagagaaaaaatacaatggaagaaaattaatttaggaaaaaaattaattttttccctaaattaacaaattaaacgcagttcaaatatacctgtattgtatataggtatattttaacatatgtgctatattatatgtattagaatcaaagtcctctttgattcaagagctattttagagacagtgtttaggtattgtatatagttacaactgatgaacccaatttgatatatcataatcacccaaagtccatagtttacattataattcaatcttggtattgtacattctatgggtttgcacaaatgtataatgacatgtgtccactattacagtgtcatgcaaagtattttcactgccctggcaatcactgatctttttattgtctctgtagttttgtcttttccataatgtcatatagttggaatcatactgtatgtccattttagattgcttctttcaattagtaatatgtatttaaagtttctccatgtcttttcatggcttgatagctcatttcctttaatgctgagtaatattccattgtctggatgtaccacaggttatttatccattcacctactgaaggacatcttggttgcttccaggtttgggcaattatgaataaggctgctgtatacatccgtgtgcaggattttgtgtggacataagttttcaactcctttggttaaatcctaaggtatgcaattgctggatcatatggtaagagtatgtttggtttttaagaaactgctaaactgtcttccaagttgctgtaccattttgcttgcccaccagcaatgaatgtgagcttctattgctccatatcctcatcagcatttaatgttgttagtgttctggacttcgaccattctaatgagggtgtagtgctatcttattgttttaatttgcatttcactaatgacatatgatggatgtggggcatcttcttctcatatgcttatttgccatctgtgtgtcttctttggtgaagtgtctgttcaggtctttggcccattttttattcagattgttcattttcttattgttgagctttaataattttttgcatgtttggggtaacagtcctttatcagacatgtcttttgcaaatatttttcttagtatgtggcttgccttcctattctcttgatagtatctttcacagagcaaaatttttcattttaatgatatcagattgtcaattcttttttttcatggatcgtgcctttggtgttatatctaaaaagtcatcacctgagttctggttccaaaatggcagtgaagaagcaagctggcacaattcctcctcaccatcactcctagaaaaccaaaaacaaatatatagcactgagaatatcaccagaaatattccagaactcaaatatgaagatgagacagttccaagaaaaacagagaactaaaaagttatcaacaaatttagtcaactaggttttctccaatattatcttctagtagttttttagttctgcattttacatttagatttgtgatccattttgaattattttttgtgaaaggcataaggtctaggttcattttttttttttgcatttggatgtctagttattccagcaatacatgttgaaaagactatcttttcttcattttattaccttgcttctttattacagatcagttggctgtaattatgtgggccttcttccacactcactatcctattccattgatccacttatctattcttttgtcagtaccacactgtattgattactgcagctttacagtaagtcttaaagttgggttagtgtcagtcctccaactttgttcttcttcaacattgtgttggctcttttgggttttttgcctttccaaataaacttcaaaatcagtttatcaatatccacaaataactgctgggattttgacagaaattaaattaaacctttagttcaagttgggaagaactagtgtctttgatatattgaacactcctattcaaagacatggactgtctctgcatttatttagttgttctttgatctctacctcactccatatagaaaataaattccaaatagataaaatatttaaacttataacattaaaccaccaaaatactaaaaatacaagagggaaaggtgatacagatgcatgtgtgtgtatgtatatattttatatcctttttcctaccccttactgcccatctctctggatgcctttctaagcattatacagtatccagaagccaaagaagaattagataatcacctaacaattttaacatttttaattaaatcttttaaaatctgtagcacaaagcaccataaagtcaaaaaatatacatttttaaaagaccacacatcaaaaaatcaagtggctaatattttgtcttaaaagatgctatagattgaaaaaaatagaaggaaaaaatgggctgtttttaaataagcagttgcaggaaagaaaataaaaaataattcttaagtataagaaaaatatattccacttttctcatagtaagacaaatgcaaattaaaattataatatgctctcatctttgtccctgtcagattggaaatatcaaaaatatgataacatattatattggtgaggataaataggcactctgttacattgctgtcaggagaataagttcatacaaactccatagaaagtagttttgcagtaactatcataaataaacattctgtacaaagccaagtctacctttaaaaattaattttataaatatatccacatatatttgaaagtatgtgtgtaaaaatgtattacttgcaactttattcaatattagctaaagattggaaacaacccaaatactcacattcagggaattggttaaataaattatggcacataacatgcaatggaaacccatgtagccagtaataggtacgagtcaaatctataaaaattaagataaatgaactctaatatacattttaagtaaaaaatgctggtgtaaaacagtttgtataataagattccatttgaatatgtattttaaaatagaatatgtatacatacactcatgttctagcatatacctattgaatacctggaaatatatatgggagataagtagtagtagttgcctctaggaaggggaactgggcctggggaaacaaggtaaaaaggagatattatactgcattttcttttagatatttgcatttatatcatttacatatattttctatcaaaaagctatttaaaaataaaaactatatatatacatcagaatattttatttcccttttgagaaaagttactatatttgttatccctaaacttttatttgcaaaaaataaatgttagtattttcctgatgccttgtaggggaaccagagtttgtagacagaacattcagttttcattgatttacagacaacctattcttgcaggtactaaataactgcaggttaagttctaagaaccgctgaaaacttcacttagtagactaagggtacaaatttaaacttgagtcctcccttcttttgatcatccactctgaaaaatatggttataaacctcacaacaatgagaacctccttgaaatttgaggtctctgtccctcacaaaataattatgcctgcaattttcttattgtagttcatatacaccaaagctataattaactgtaccatagcttgctgaccttaatgagttaatgcagtctccaaataaaattcatggccaagtggcagcttaggctctggaatattttggctcagtaatatctgtgaaatctgagctcatattaaatatgccttaaaacaatacatttgggatttggcgtctggcatcagatcaggtctgactctgctgtatggggttgacggttttgcctcaggccttcataatatggttagcactataggactatagaatcagcaagaatttcattattgcttcagtgaagaaaaacacttagtttctattgagtttatggcaccctgacttctttctgatcatttttcttgaaacaggagactcctgctgtctcctgcacctacagctatcttcttccacccccacctccatctagcaatttctttacagcctagttttcctctccttcttactcacataaatgacatttgtccaaccgtggactgtctttatctttatgtgttcaagtaagccaaccatgcatggctagtgaagtgagcaggacatagttccagttgtctcaaatcttagaagaggttaaagcccagtcaagacagcaataactatttgattggtcattaaggttggtcactgcaaactatcctgactatcttggccaggaatcacttgtcagacctagagggttagattttatgtcctctcagagacaattccttttcccctcatccttgttaaatgagctatcctttgcctttatacgcacagtctccatcttctgggtgtgtcacagactgaataactcattagtgatatagtgttaattagcctaatgtactttgattaaggccatatttgaaccacttttaaaactcatggcacagttcctgtatcagtaaagcacaagaattaataaataagtgatgcttaactaaactcaacacagaaaccatttgtgttaaaattttttctttagaaatcacctttcaatttaaggagaaaacagactttaaatcctctagctcatgtttcatgacaagaatttatttatattaacatctcttagtccactctttaaaatatctgtattccttttattttaggaatttcatatgcagaataaatggtaattaaaatgtgcaggatgacaagatggagcaaacagtgcttgtaccaccaggacctgacagcttcaacttcttcaccagagaatctcttgcggctattgaaagacgcattgcagaagaaaaggcaaagaatcccaaaccagacaaaaaagatgacgacgaaaatggcccaaagccaaatagtgacttggaagctggaaagaaccttccatttatttatggagacattcctccagagatggtgtcagagcccctggaggacctggacccctactatatcaataagaaagtgagtgttttttatcaggcatattttgctgctaattgcctactgcattccttggactgttgtagcaccaacacatgccaaattagcacaaaatcttaagtatccttctgtttaagaaatgaaacacatttgtgggtggtttatgcatatacatgagaaatgaattgattatatcataacatatgcaactgtcccaaatgcaccatgacaaataaaaagaggccaggtgcggtggctcaagcctgtaatcccagcactttgaggggccgaggcaggcagatcacgaggttaagagattgagaccatcctggccaacatggtgaaaccccttctctgctaaaatacaaaaaatttgctgggcgtggtggcacacgcatgtagtcccagtcactcaggaggctgaggcaggggaatcccttgttgaaccctggaggccgaggttgcagtgagccgagatgacgccactacactccagcctggagacagagcaagactgtgtcaaaaaaaaaaaaaaaaaaaagaaagaagagagggtgggagggaaggaaggaaggaaggaaggaaggaaagaaagaggcagctaatttaacaaattgacagattctctccacagattcgatttactatacaatttttttgtactttctgtacttggaaatacttggaaatctcaaaatcatgagttataaagactatacaaaatattagtactaatttttcatgcaaacaaatttgatgccacaagggtttgcaatttcaatgtcatgttataaacaacaaatcaattaatttcctgaagaaattttgttacctgtaaaataacatttttacataaactagaattttacaagttatttaatattttggtattaatgtactaatattggcaagaattaacaaaaatgtcataacctgaagaacctataaacaatatttgaatgcgtgcttttttcatatccatgcttgaaatgaatcttatgttaagcatccaaccgttcattatgactgtcatttcaccaaaccaaaacaaaaagcataaaattttttttaagattattgcattgattttaaattaaatgtatgacgttaggtgattcgtaacattttcttctttatcacttgacacaatgcatttgtgaatcttagtggaaaggtagggcacaaagattgtaattaagtaaatttttttgttggacctggaccttaaaataccccctaaacttttagggactctgtttctggcccagttctgtgtgaagttagtccttgccaaatgcatgcaaaagtttggcatttgtaatatgtgaatttgaggcagttttataaatcacttccgattgacagctacagtttcggaggaaagagcgtcacaaaaggttgactagccttaggttcagatttttttttaacttttcaggatatagtcagtttaagtataacatattttcccttttttttttttctttttgagacgcagtctcgctctgtggcccagactggagtgcagtggtgccatctcggctcactgcaagccccacctctcgggttcacgccattctcctgcctcagtctccccagtagctgggactacaggcgcctgccaccacgcccggctaattttctgtaattttagtagagacggggtttcaccatgttagccaggatggactcgatctcctgacctcgtgatccaccggcctcggcctcccaaagtgctaggattacaggcgtgagccactgcgcccggccagtattttcctttttttttttttttaaacattatacaactttaatgttacaccatctacaaatctaaattacatttaaaattatcagttgacagtggtactaggatttactttaggaatcactacatatttcccctttttaaaaactgatctattcattttacagtagaggaagggatggatcattttccatgtatttcattttcctctaactttgcttttgaacaccatattgtcaaatcttagttgataagagattattaatctcataactgccatttaagttatgagaaaagttgcactttattatttaatcaactctttggaaattaatgtatctgaaaagccaaagcccaaactaaacaaactacaaggactttatttgtataagaaaagtaaaaatgcagataatccaattgcctaaacattttaattcgtttaaaatgacttcggtattgaagtgaagactgatgtgttccaggcagaaattcattcacagtatagagtatgctactgtatttatagccattggatacttttagtttattcagaggctgctcttgggatatgttagtgggctccatcctcaacaggccttttgctacccccagacaccgggtcctcacctctttggtagcaatcaccatctaaaaattattaaagccacccagcatctatcccttaatcaaacagggaagaaatttagtatctctgctcctatgctgggtccttatttgtaaaataataaatgaatgttttgagaaagaccaaactaatgcatgttgacaaaggtagacattcttcatctggaaaccagaacaaccaatcaatcttttttttctttaattaaagagctttcagactgataaaagtgattgtctcgaggggatgtccctaaacaaaatggtccataattggtttataatgaattatatatagcaaaggatataaagacagatgtaaaacaaaattgtgcaaacattttcaaaatactcaaaagaaacatcttaaaactgagggtgaaaggccaactctgatgaagtgacagccagattcttgtgtcgaggaaacccttataaactttgttaggctcacgtctaaacttgctcttaacatcttctgttcttatcttcaaatgcacatggtatgaggaaagaaaagcattttggcattttggagcaaatcacagtgtgcaagtagaacaacctgataagggaaatattgttatcaggaaagagttttccccaaggtaaggtatactcatggcttttacattgaactgacagcaagcaaatcttcaaatgtaagtcattcaacagcaatgcacacgaagctttttgcagggctgaaatccttaaaaactaacatggtgtgcttagaacacatgattgagttatgtgtttgaaatttccttcttctgcatttttatgtcttaagacttttataagttgcctgtacacttttttctgcctttaattttcttttctaattggattatttcagtattgaaaaatatccttaaatggaattaatttgctctgactaaagttggaatgcttagcaaaatctgaaccttttaaaaataatgaatatttctttcaatattcgatgactaattttactttagtgactgggttatctgagattggctgggtgatcttcattaaaacaatgcggtacacatacacagtactcttgacacagctaaatggtcaaacagtggaaatgtcaccagggaaaatgtttattaggacgagattttccactaatgctgatactgggggtgtggattagatttgcctgagtgaaatggaatatgcagttagactagtgatttccctaaagttggactctagtacaatagttaatgtgtcatttgcatcagtatacaaagactctggtttctttctcaactatatggaatagacaaaacaagccaattgtaaaaatatttgcagaatccattccttatgttatattttatgttaaagtgcagtagtgtacatgcaaggaatttatgtgaatagaaaaaacacaaccaccacactgaagctctctgtaatcttttacaaaggcagtgtcagtgagcttattaaaatgtcactgctgagagtatattttccaatggcatatgcccacatatttttatcctctttgtcccagtttaagatgtgcaaattatgtaatgttcaaatattctactaaaattgttaaagcagtttaatccatgttcagtaatattgtagtagtaactaaagaaatagtagcatctatgcatcatgaacattcctgatgcatagaagcattagaaggtttttagatcctcagatgttttaagccttcagagttccaggttaaaaactcaggggaaaaaaatgctatcataatatggtgacagtatttttcatatcatgttagctctgactcagtggtctttagaacatgattccagattggtttccctttgtttgtttatttactttagctgtgtagcaaggcacattttagcttgtgaacacacctttttttccctcacgggactttttttcacagtttcctttcatagcttgggctgattttgtaccatttggccctacattcaaattctttacccactctttattacagaaaatgtcttccttctcatgttcttgttaaaattacagacgaatcattattaccatggaagaaaatatcattttaacaatgtgacagtttactggaaatagaatgagacattttagatctgtagtaaaaatggatgtttgttaattatggagtgcagaaatgcattcatttttaaaaagtcctatggatcatttaaaagtaacttattctctcttgctatcaactgtcctgaaaagatgcacactccctttttcttgggctccatgagaagtcatatatgaatttgtgatttcaaattcatgtttggtctatcactgccaaaggagtttttagttgttaaattgggtggagagagtttgttttgtttttaattggaattatggagtttttcttgcaaaagtaattaacgggaaatcagaaaagaggatgattattaaaagcttataatttcacgaattgtcatatgggcagtccccagtgtgtagctgttctttgcttatcatcagctcctgtaaaactaaaagtcacccagactctcccttacatccaggaccctgtagttgacttcccaatctttctcttccctatgcactatttcttccttgtgcttctttttcctttgtcacctccctgtctctgtctcagaaacagtcccaagatggtgatgttgatcaataaaatgatgcttggcatttttagagtatctgccatatctataggagatccttcaactgaaagtttccaaaacccaacagaaacaacttttggggaaaaataaaggaaatgtgtctagtgaatctggttttaatatcaaaatacccagtacctcaaacaatgtcatgagggtactccttttccatggtcagctctgctgtcacccatgctggcttcatttgcaggctggctcttccacaagatggcagaaatagccaccagtggtgctaaactaacatcctacagccttgtaactactatcttctgctaaaacaagaaagaagaaagaaaaaaggcccaggtttccttcaaaagctctagcagttgtcctagaattgagtctaattaggtcacatggcctcctctgaaccactcactttggctagtggtatgtgatggtctccttggtatgggatggtctctgtcatatactaacctgtgttgccaaggggtgggtcagctccaccaagccacatgggaagacagtggggcagagatttactccaaaaggaagagaagaggaactgttagaaaaggtgtcctaagcaggcaaaaaaaaaaaaaaaagctatgtactctacatgctatatataatatcagtataattactgttcttttttaatccacagattctttcaagatagctcttgtctttatttaaaaataataaaactgagtttaaataacttgcctaagactagttttaaaactagaccagtgagtttccatggcccattgccatgttagtttggatttgcagtcatagcactaatcacagcagtggaaaaaaaaaaaagagaagtcagtgatggaatctaaataagcctatagctgtccttcctgtttcctactcatgccattttgcaagatgtgattctggtctcccaggccggcagtatttcccgaacccttactggtcatttcaacacttggccatttcctgcctttgtaaaaccttatttatttattattattattcatttttatcaacatcaccatcttgggactgtttctgagacagagacagggaggtgacaaaggaaaaactaaaatcttagacactcagtgatctagattagcttctaaaataattagaaattttttttcccactaaattccagtagggtgataagcacctattttcaaagaggatcaattcaggaaatttaaattgtgtgcctctataaggaaatggcatttaaattgggatctgaaggttaaaaaggaggagggagaggagaatcttccaaggaaagagaacagcatagaataagacatataatcaagctgacctgtaataggtaagaagagaataaggtgaggttggggaggtagacctggggctagataaaggggatctttcagtacatcttaaagagtttgaaggttatcttcaaagcaaaatgaattcccaacaagtatttaggtacagcagtaacatggtccactttacattgttaaaaatcactcaacttctctatggagaaatttaggagttttatacttgatctagcattttgacaatggagatggagaataatggatagagtcagaattggttttggaggtgtttaggtgtcagacagaaggaagctgatggcctcattttcttagataggaagtttgagaagaaagatactgaacctgaaaattccaatactaaaattggccatgctttggagaaacagaaatgttcttatatgtgtatatttaagagttagaatacagagacgcattttaaatattttaatccttatatttttattgacactttagaattcactaagggcattgacatgttttatttcactttatcctcaaaataatcctaagattggtattagtataatcttctccattgagatggagaaattgaggggaatagtttgctcatagttctcacacagcaagcttgtaatcaagctgggctcaaaagtgttctttccagtcaaagaaaaattaactgaccatataatagtgtagcagacccatggtatgtacattctgatgatatagggctgaaaaatgtttcagctccagattttattctttttccttgttgttataatttcttctctctgctggagaagaggttgagggctctgcagccttggctgacaaaagcctacctaggcactttctagggaggcaccttctgcagagttatctcctccactggccccaaccctccacccagctaaagcataggaacaagcaattttacagactcttctctaggtacaaattcttctcttttgtgtgagcatatggcaacaatgtttaaaaactgactgtgaggcatggagtccacagacatgttttgttaaactaacaaaattatttataattttgaattattttctggcatttataaatcagaaaatctttcacacactcataaaattatacatctaaggattcctcttgaaatatgagttcaggcatcactgacttatatgcctaaaactggcaggtacctattgtcacttagcctctgtgggcattttagtttgtaatctgtggcttaaggaccacatctgtcattaagtgaaggctatatattaaagcttggtggcccacgggtaggcaagtgacacagattgttgtttagtctggttatcactggttggaaggaaaaaattgaatgagactaggagatgaaaaaatattaaatatggcatactctcttcagagtcaggtagaaagcctgcaagaaaacttttcatcccccagtgagccagaaaaggaagaaaagcttggcttgaactcacaggctatgacaaatgagaagggaagtaggtgagaccatttaaagtccttggggaaaaaatattatataccatggaattgacccagcataagaaatgtccccagagatatgtattatactaatggaatctcctgaccatctatgctgctcttcacacccaaaactttgaagcatctctcctcttgcaacatggctctaattctcccccttcatgctggaacctctttccaagccagcagcttagagctatgaaaaacttaatagcacttctgggtaggagctagagccagataattttcctggtctgacttccaggctatttcaaggacagaactctgccattttcagagtaacactttcttacacatagtgataaagtttctcagtgccattcattcagaattgtacttcattaacagtttgatagacctgtgggtctagaaatatatgtgtatctgtgagaatatatgttcacatttccaaacaattgacttccaaatgcatttctggagcacagctcatgtacaagttggaaattgcctgtttcaaactttgaagctaaaggataaatttaaccaaccagtagtatattctacattttgtgtattgttcatcatcatagctcaccttcctgtgttatttcttgtttttgccagtagatttactttaagagtaggaaagtgcaataaatttggagtcagtcctgttatttggcaatgtttcaataatgtttagatgaaacacaaagttacagcttatgtttaaactatgtactttgaagaatatggcccctagattgaaataaatgttaaggtaatggctatatttaaatgagaaaaagaaactggaaaaccatggcttgttaaattcaatgtccatcctgggaaaaaattgtaaacaaatcactttctataagcccagaaacaagaaaagattactagataataacaaatatagcttcataaatagcaatttctaccaaatcattataacataattattttcttagtaactattcagttagatcaaggggcaagatttcaatccacatgtacaacataatcattgataatttggccaatggtttgtgattttttacaaccattaggtaacaaacatattaacagccctgctatgacagaatcatctggattacttatttaaagtataaaaactaggtatcaaaatctgaccagctaaattggaatcacattacctctatgagctaagtacatttattctgttttcaagtgagataactgagtcacagaaagttaagaaacctgttccggatcacactgctggaaggcagcaaagttagcttttgaatcagaaatctaatttcagagtttgcacccttaacataagataaaacaaatcatacttatattttcataatgttgcttcccagattattaaactgttaattaccagggttattaccaatttttctatataacttccttcttgctttttctttaaaaccagaaatgatttttacatggcaaggattgctgaagaaggtatgagcttgctgaacaatggatggtttaagtttaggtctgtgctgcccaatatagcagagattaattagccttgtgtagctattgagtatttgaaatatgtaagtgtaactccatatttcaaagatctaagacttagtataaaaatatacatatctcaaaaattttttatatcaatttcattcccaaatgataataattcagatatgttgggttaaagaaaatactgttaaaattaatttcacctgctttgtttttcttttaatgtggctctcaggaaatttaaaatcataactgtagctcagatttgtagcttacattatatttctgttggaaagtgctggtcaaggtaaccttcatcaattcttctatattctattaaaacaaatagttgagcatctcctagtttataaatgtcttggtgtcataacctatgtatctttgttttctctttagaatgtagcacagggcattgcaaatattgtactaaacagttaatacatgtattctgaattgccatcaattgaaattaacaattggacctaaactaggtccctgctcatacataattaccaacttattgtatatatgcccaataaacttggtacctgtatatgaagacataagtgacaagctagaacaaccctattgtatgaatgttacattcctgcaaataagtctgtaaagtgatttttcatatataaaatctagttgttacctcagttacaatgccatgcttcaacatttgttttgaagcagaaaattatccacgtgttaaaatgatgttattaatttcaaacagttctatttctttgtagaactgcaattaaagcatttgttttggcactaaaatgaactgaaggacaaatattaagaatagtcatagatgtgcctgaattgtactaaaccacaaagtcttgctgcttgtaagtggagccagtcatgtcaatgttcctatgagccttgggtggtaaaaaggggtttgttttgggctagatactactgtataaaccttttctcctccaccaccaactttgaactgtttcttttttattcaaatgacttaatgcaataaaagttatcctgataagttgtattaatgaaatctttgttgaactaattagatttaaaggatgctaagatacttcactataataagctaaccaatacattcttttaaaaagtttttaaaaagtcacccaatttaatagttcataaatcttgattagcttaaagctacacaatatttgtttatacagtttaaggtacagcaatatcttagctagtctttgaactcttccctcttggagccctttcttatacgtatagcggggaaggcaaatatttatatatttgaaaactctagagctacttaagtatttgttgtaagcaaacagtatttccttcagactcttccctcccttcaatatcatcaatgccacttttgggagaaagctgtatctgagagtccttggaaacaagtatccttttattaattcttaacacttataaactgaatgatcggcttcttggctatgtaagcaattacaaggaggtaagatacagacagttgaggaaataaacaaacataagatcaattacatataataagactgacattctaaatggaacttactctgacatgaaagtgctatcatatttaaaattatacatattgggttgctatacaagtctgggtactgttgctttattggaaggctgtttaaaatccatcaataccttaaagctacatctatgaagtttgtacataagcatgtatgtttcaatctgagaaaaatggagttctcacagaagaaatcctatgaaaaaatggtcctttaatgttggccttattgttagcttcctgggtagcaaggatgtcttgcacaacagtatgtcttatgaaaaattaaagcaaaacaaataccgttgttcagtaaaaaccttaccaattccatttataaattcaacttgcaagtattttccattgcacatataaatcttgttaccaaataatcttctacacattctttaaatttttaaaatgaataaagggaatacactgtaaaatcagtaaatgttttcatctaaggcttgaacaattgataattatgcccatttgtttttaacttttgtgtcaaagtattaattttctctatgtcaaaggacttttagatttagaatcacataccaacattgagagtgctttggtttcattaaactcatcttacttagtttcagccctttatacctccttttatcttattttttaaattgacacgtaataattgtacatatttatgaagcatatagtggttttaatacatatgatgtatagtgatcagatcagaataattagcatatccgtcatctcaaacatttatcattttttgtgttgggaacattcaatatcttccttccagctatttgaaactatataataaattatttttaactgtagtcatcctacagtggtgtggagagctagaatgtgttcctcctatctagttgtaattttgtgtcctttaacagatttctctctgtccccacctttccccgatttttgtctagaatcctctgctctttttacttctaggcagacttcctttttggaaccttttgtgtttggtttctgaatcttgcctcttttactttttagtactcagggcagaaatatttcccctcccttcttttagatctctagctttgccttttactttaccactccttgtctgtcttttctgttttggtcatttattacctctggtcatggtttgggctgaacagtggccaaggagccagcatcacaggtgttctcttctaagtatggtcctgtctccttaggatgagcctggttattttccttatccacggaggtacaaacagtaccatcttgattatcctcacactccagcccatgatttaggccatctatggattgtcatttctttctcattatctctttgtatcactactatttgtttcaaaattagcttttaatattatctgaaatcaagagattcttattttaaaatatatatattctgtgttatatttttactggttctcctacctgtgcccctaatatttctttttctttttttcagatggagttttgctctcatcacccaggctggagtgcagtggcgcgatcttggctcactgcaacctccgcctcctgggttcaagcgattctcctgttctcctgcctcagcctcccaagcaactgggattacagggacccaccaccaggcccagctaatttttttgtgtgtttttagtagagatggggtttcaccatgttggccaggctggtctcaaacttctgacctcaggtgatgtgcccactttggcctcccaaagtgctgggattacagacgtgagccactgcgactggccatctgagcccctaatatttctttcagattttactcagcatatctggggggaaaggaagtatatgcagtacatttgaaaggtggaccatatttattcctgagctagctcactttgggcctttctgtgtcgttacatgctcatattcccccacagcaaaggcatttgcattgcacaagtctgttcagatttacgatgatctcacaatgtcattcagggacagaatccctcaatgaatcagagaaaaagagggctaagtattgttggcataggggattgttcttctagtaagcacaggtgaaattctcccttccttcaaatgcgctttgtggtaaagctctatctgttttctggactcatactccttcaaagatgatagagggaatgcaggcagaggtgagacttggagcagtgcttctcaaactctgttgaggatgtgaggtctctattcttctataaaatgaagtaaaaattagtttctagaaaactgaaatgaaaaacaggcccacaacaacatccccctacttttttattattagaatagacagacacaacattaattggccaaattgccttacaaatttctaaacatggactctccatatctatacttaaccagtactggttgggggaccatactttcacagccagtttaggacacttctacccataccagatagaaagtgcttaattttcaaaaaccaactccattagcaggtaggggtgtgggagggtgggtttgctttacttgaatttagaaaatcctgcaagtataggggaaatctgttaatgagctaagactatacaaagattcttagtagaaaataaacataacatttatgcttgctgtatcataacatgatctgtgcagatatgcatcctaaggcttagaaaagaaagctttcgaagaatgggtgaatttaaaatcaagaagcttaaaatttccttccccaaatatgctcttcacagagataaaggctttctccctggctctgtctaaatataagtaagcaccttggaaaacattgagtcagagccctttttatacccttacatgttgcttctttaatgttttgtctgcccactgccaattgatctcaaataagtctaatttttggaaggaatttcattcacattcatggatcctggattcttcaggagcttggagcttctcctctgtgataagaaagcactgcataagataggaagtcaattgggattagaattcaatatgtcagctaactcagaaatcccagtacagaatttagcactcctggtcaacgggtactctccagggatcttggcctccagaaatcaattattggattacatccatctaacccaagagtgggtttgatggtggctgtttttattttctattacgaagagagtgataatgtttattttatgaggatagatggtaaaaacaatctttatttcaaaaatagtatcagttctgttgaatgattttgcgttccacaggattaattttcaagatatttgaattgggaaagctgaaatgactataaaaagcatgtagtgccttaagttttttggaatgaaatgaaatgtgcacccatttaagactttcatttaactcagacacttaaaatatcgagaaaataaatgacttctcttggctaattgtcttatgtacaataaaattgagggtaagtattaggtaaaaggtaagtggtatcattggatttcctctctaattaagaagagatccagtgacagtttgttttcatggggcactttagaaattgtgattgtgctggtttctcatttaactttacaataatttattatgacaagtaacagaaagtagataacagagtttaagtggtttatactttcatacttctatgttgtgttcctgtcttacagacttttatagtattgaataaagggaaggccatcttccggttcagtgccacctctgccctgtacattttaactcccttcaatcctcttaggaaaatagctattaagattttggtacattcatatcctttttcaagtgattaatattaactatttgtacatgatctgtaagcactttatagctaaatatcaaattaagttgggaaatgtccatattatatagttttcatcactctcattttgcatctttgtcatattagcctcattcttaaagttcattaatcacatagacattactgaaacatgtactctttaacattttatatattatatataaacatgtatttatgtacttttgttatctttctaaaaacacttatatgtattgaatcctacaaatctaaagtaagataaccatgtttacctctaccatctttatacaaagtttgtgatggtgtagaattttcagtgagcaatgatatgataacagaaaaatctacttccagactcaagtttatccatagttatgatataaaacacttcagtgtatcttagaataaacctttaagtatattttctgtcagagaatgtcaggagtctttggccagtacttagttaattcttgaaatttcctgatgatttttgtgaaggaagtactggaatattggctgaatttcaaattcaagtcatgagttatgatgctgccatgcaaaactgtttgcttagtaaagactccggaagttaatgagagaagttggcatatatttccaaatggtcttaagggatttggtttcatgattcccattggtgttaaaaaggactccacgactaaattcatttgttaatcaatttaggaaaacaattcacttctgattgtatcttgtttgatagctttgacaataatagatattaaaataccattataattatcataagctcatacttttttttaaaggattctaaaatttgaacggccattctaattttaatatgacagcaagaaatttctttagtggtataaatatgctattactaaaattaaaagatttgaaacataaaaatcatatgatagggtttttatacttagggaagtttccttgtcccagtttgtattcctagcgccatcatgtggtcatttgatgaaaactttctttttcaattatggaaaatttttgttttggcagtaaactatagtggaaagaatattggatcttaatgtaggaaacttatattctagtcctggaccctttatctgattcctctagagcttagtaaggccttatttccctgatttttaaaatatagtgataaactaatttttagggtccctttcagttttataattctgttatgtctgttcatttgttttagctaccacttagagtatatttacttacgtaccgtgactgttccaagcatttccaatacattaactcatttaatctgcatgtagaaatggttacattacaaaatgagtacattattagctccattgtagagaagtaggaagagatacaaggcaatggcacagagaggttgagtctcttggccaacatcactttgctatgttgaattttaattacattcccatcatgttaagtgtcaaccttcaagaatattcacttttaatgttatcgaatcctgctgcacttgtataaactcagtcaaaatagagcaacccaacaattagcatcgtgctgtactttgactacaaattgttttcatgcgttgaactgtgttggataagatgtgtttaagaaattacaatattgcagataagtggccttcctcaacaatttactagtttattcacctgaatgagctcaagtcaatactttctgctgaaaaactgtgcaactccaggtagcacaaaaatagtcttcccactgaagttctctgggaggtgaatatattgatttaataatagttgtaaaaacaacaccttatactgatataatgctttcatatacattacctcatttaatctatacaaatactcagtgaaggtgatattattacccacattttacacatgaagaaattgaaatgtaaggagattagaagacttgcccacaatgcatttatccctgaattttggctaagctgcagtttgggcttttcaatgttagctttttgtaatataacacttggattttgattttcttttgtgtgttccttaacaataacctacattattcagcatgctaattatgtgcactattttgacaaactgtgtgtttatgacaatgagtaaccctcctgattggacaaagaatgtagagtaagttcaacttatatttttaataacatatatacatttgggattttgaaactgtgtcttaatgtagtcttaaaataaaactgaagagcattttattaaagtcattcctagacaaaattacgcagcaagaggacaatgctcattggccctcaggcctgctggcgttatactgattatcactctcttttgcctgtacctggtgttcacctgaagaccaccactcttggacatttacccctttttctttaaaatctacagtagccaaaccaaatgtggtcaaagcaattgcagaaaagagccaatatggtagacattggttccagttaaattccagataaatacattgaatcaagaatcaaaaagggttagttacaaatgccatgtgaagacaacattgaacctcgcaaagttttcatttccatcaggcacattcacttcatgtcaggccaatatagttccaagcgtggtcaccaacaaattgaaaaataatccaaagtttcagggttgtagaacttgaaaattcagtagactgaagactaaactaacagaagtggaactttttgtagagctttcagaaaccagaagcattactaactatattgatgatctctctgttctggggataccttcgaagcacagaggccagatttgtgataactgaagttgggctactctaaccatagctgctcacctgcccacacttcctatttgtaatgcctgttactatacagctgctgacccatagcaactacagaagtattaggttggtgtaaacataattgtggtttttgccattaccttcaattgaagctaatgtttgcaccaacctatttccaagagtgtccaccaacatttgcaccaacctatttccaagagtgtctcctttcctagacacttccaggctgaaaccaataagaaacatgacatcttgaagaaaataataaattttatatacaaaaaaattctaaagtattgaagctaatatgggaggccccacaggttttcagtcgccctagttttcttgtgattttatgccactctcacaccccaatttctgagtagaagatttaaactttggaaacacctaagtttctgaattatcagaagaattttattctaaattaaatttttacttcttataaccctagaagtatttactttgattttaaagaagtccttgttccaagcaagttaaattatcttgtagaaaaaaaaaaacacgtgctaatttgtcagtttcctctcattcttagaacactattaaacttgagatttttttccctaaaagaaaatcatttcatgcttctgcaatattattgattggctattccatcatgtaaacatactaaatatttctcaggagactatatttacataaataccaagacatttcagacaatggctaaatagatttcatataccttgtatttctcacactactcttaagacactttacgaaacaactctttgtgttaggaagctgaatttaaatttagggctacgtttcatttgtatgaaattaaaatccatctgcttagttttcttttttagtatttatctattccactgatggagtgataagaaattggtatgctatgaaaaaacactgttactttatcaaattttttggatgcttgttttcagatacaccttcacaggaatatatacttttgaatcacttataaaaattattgcaaggggattctgtttagaagattttactttccttcgggatccatggaactggctcgatttcactgtcattacatttgcgtaagtgccttttttgaaactttaagagagaacatagtttggttttccatcagtgcttatgcttttaagaataggtttgctttacctgtagaatattttggtgtgatttatacattcaaactctggatttcaatttagcacaacaaaggtctaagtggaatttcactatagcatgaaggctttgcagtagttgaaaactacaattttcacacgtagcatcagtcagaaaatttcacatatgccactcttccacacacacatgcacaaacacacacacatatgaacacacacaatctaatgtcaaaacacaagcatatttgtaatacatctgtgaaaataactttaaaaattacagccacaaaacagttctattggctacacaaatttgcaatgaccttgctgatattacacacagcttcttttattggtttggtaaaataattgaaagtaagtatctactagcatcaaaacgatctgacaaatcaaactaagagaagaaagaagatacttgaaatattatgtttttaatatattaaattactgatttctaagacctgtagaggaatacattctctctgcctctttctgtttctctcctgaccccttttctttcttcttttcttctttccttttatggctctcttcatctctttagtctgaacataaacttccttatccttatctcctattcatatccactcagtaatatgcacagtttatgcaccccaatgcttttttttctagtggcaaacttcctcaggaagagacccagaaaaataatagaaaaccattccagactaagtgaaagtagagtgtagaaggaggcagcccaacaacacttaccctcatccttccttcaggagctgattttttggcctctaacagttgtgatgtagtggataggagcaggagaggtggcactgatacactcaggactccgaatgtctggtcttaatttcctatctgatcaggatgagccaattctttgctaggctctctggtcacagctcaaaagaaggcctacaggacttctatttcttaagaacaaaatggcagtaacaataggcgcagcattggaccctcatcaagtattgttcttaatttgcttaacttttatttaaaagttacactaggaaaatcttatctcatatataaaagcagtaaggcaaactgccttttcatgcctaaatttctgttgggtgatttcatatatttttttctaactaaaaccctaaaccatagccaagatttactttctttttacaagttacacatgatgttggttgcattgctttccagagtgacaacaagggtgtctactttatgaagtttacatttagctaatggccttaaattatgtgaacaaagattaatgatggaatctaattcctgatttaccacttataatatttatcatttaaaatcaccaagaaggtctttataaaagacccatgcaagtaatataaatcctgctaaaatcttgaataattctgatttaattctacaggtttgtaacagaatttgtaaacctaggcaatttttcagctcttcgcactttcagagtcttgagagctttgaaaactatttcggtaattccaggtaagaagtgattagagtaaaggataggctctttgtacctacagctttttctttgtgtcctgtttttgtgtttgtgtgtgaactccctattacaggtacgtcacagagtttgtggacctgggcaatgtctcggcattgagaacattcagagttctccgagcattgaagacgatttcagtcattccaggtgagagcaaggttagataatgagacggacccatcatgtgattcagcatccttctctgcttgacattcagttttacagaaaatcaggaatcataagactaggtgtttcaaagaaaatgattcttattgtttagacataagctttatcagccttggagtttaacaatgtcttatgtgagatactgtaatttgaggtcaaggtgacctgcacttacaaatatcatgggtttttttttttttcaccatgttagttttatcgagaatttgctcccttttaaatgtaccaatctgtaatttcttattcattagagtcattaatgactatgtgtatacaatgcaaatcttctaagttttttgctaacaaaagagaagggaataagacaataaagaatagtgtgagtctgcatggaggatttattatcttaaggcacaattatactgcagaccattttcggttgtacagcaaaatctttcctacttataaataggaattttaaaatatttattcaggtattttgttataaaactgacctctgaccctaatgaaaatatgagacaagtttcagtagcaaaaaggaaaaagacaaggccctttccttaatataggctccatgaagaacatgaaccttccattactctatctcgacataatgggatatgaatcttcatttcattgtttaaatcattacatttctggagtttatcttcataagttcttccccttcaatgaagtgttgcttctccactagcgttgcaaacattcttggatttatgaatgaaatctatgttttcaagaaaattgtgtgaagcttttattatttcacacgtgttaagtcttcatagtaatagacttctttctttcaggcctgaaaaccattgtgggagccctgatccagtctgtgaagaagctctcagatgtaatgatcctgactgtgttctgtctgagcgtatttgctctaattgggctgcagctgttcatgggcaacctgaggaataaatgtatacaatggcctcccaccaatgcttccttggaggaacatagtatagaaaagaatataactgtgaattataatggtacacttataaatgaaactgtctttgagtttgactggaagtcatatattcaagattcaagtaagaattattgttatgtacatttccttaaaaagtagaattggattgtttgtaacacaaaggataaatacttgaggggctggatatcccattttacatgatgtgattagcacacattgcaggcctgtatcaaaacatctcatgtaccccatatatagaaacacctaccatgtacccacaaaaattaaaatttaaaatttaaaactaatgaaataaataaaacaccctctaaaaaagaattactatcatgtatatttggtcttttcattgctaatgtgccttccatctaggaatgaaaaatatttttaaatgattacataacaagacgtgatcttttagaaaattacctaatcaaactatttaacaatatttaaaattatattttatttggtatttctaccccctggattttaaataatagattatttatatttctggaactaaaagaagaattttgttaatcaccttatcaatggcttccacatacatttaacaactttgttcataactactctagttttgactcctaaatgccactttctattttatcatcatttggaaggctgaagaattcagctagaaagaattttcctaggatccttggttgctatacattcttcctgtggtgattgatataatgaaaggagataaaatatgtgaatgccctttgcgaattctacaatactatgcaaatgtaactcattatacattaattacacaatgtctttaatgtatcagaaactgtatagtacactggggaaaataatggaggtaatgcatggcttcagagtgttatagtttaatagattattttattaccttaaggaaataaagtgatacctaaaagtaaatcttattcttatatttaaaaagtagtattacattaaaaagaagaaaattacagttaataaagcttcaggagacagtaatagaaaatgttagttgggtgcagtggctcacacctataatcctagcactttgggaggctgaggctggaggatcacttgaggccaggagtttgagaccagtgtgggcaacatagtgagaccccttctctacaaaaaaaaaatatatacacacatatatatatatatatatatatatactttttttaatgagttgggtgtggtggcatcttcccatctcagcctccttagtagctggtgatacgaatgccagtaggtccacttcaatcaccagctccctgaaatctgttgtttgtttgttttatctaagttcaaaatactgactatgagggttatttagggtttattctctctagggaaaatttattggactgcatttttccaatactcgaagtaaaataatatctgaggtcattttcagctctaaacatctatggttcttattttaaaccaaatgcaaatataaataaaatggttcatttctgaaaataatagaaaattaaatttattaaaattaaaggtaactattataactgaaaaattatattttcctcaggttaaggctgatcattaaggttagatcattgaatttaatgggcaaaacttcatttataaatatgagatatcaaaaattcatccagaaactattatagtcctttctctttgtttaattttaattgaaagttaggaaatactatgtcaactttcctgtctaggttcaaggaagtcagaatattagaaataaaaatgatatttttccttatgtgcttctgtgtcctgtacagaactatgtatggaataaattcctcagaaaacttagcatctagaaaatatatcttcttacaaaatccaacattgattgtttaattccatgtttttctctttttgtcttttatttacttattcattcaataaactttacagaaaggctacccggtctcaaacaaacactaatatagaaataattaatgattgggactttctaggaggaatatttgtaaataaataattacaatatagtagtgtcatcctaagaataattcaagtatatacaggttactggtagcacagtgaggggagttcttaattatgtcaatatttagtagaaagaaagttgaaaataccaaggaaaaagttatagaagaactggacattgcaagaagccaaggagtttgcaagaaacaggaatctttgagataatgtagtgttcacctatagtcattattttagctttagtatttaagactttttaaaattgctttcatttcagttgttgatatgatttatgcatattttactataagttgcctatattctgcaaaatgtgagaatatgttatacttaattattaaaatgtatagtgttaaaaatataggcgagaggaccagaaaatatactattcttttattttgaaatatgtggctgttttgcaaaaacaaagaaattcctgtcattcctgtctatttttactgaatgaatttttttcgtgagaatggtgaacaaatgctaatacctttttgaaagattatgttagtacctgtcattatcactaactttacattcataatgaagaaatactttgcactgtaaagtgtctaaagtatctttgcactgtatctaatctaatgtcatttcttcataatgaagaaatactttgcactgtaaagtatctaatagaatatctagaatttagagggagaagagacaaatacttgtgcctttgaatgaataatatatttaaaattactcaataaacttaaaagtagaacctgaccttcctgttctcatttgagtgtttttaacaatgcaaatgttcatcatacgactttcttttttcaaacaggatatcattatttcctggagggttttttagatgcactactatgtggaaatagctctgatgcagggtaagtcaataatttgtgtgtatctgtgtatatttgtatgtacacatacatatgtgtatcttttctctctttttatagaaactgaagataacagccaactaattttattgacattaatttgctatatgtaaggtttttgataaagtatgagattatgtaaatattaggtaagatttatgttttctaaaacaagaagtaatacttttagacacatgcacacgtatgttcattgcagcactattcacaatagcaaagacatggaatcaacctaaatgtccatcaatgataggctggataaagaaaatgtggtacatatacatcatgggatactatgcagccataaaaaataactagatcatgtcctttgcagggatatggatagaactggaggctattatccttagcaaactattgcaggaacagaaaactaagtaccgcatgtcctcacttataagtgggagctaaatgatgagaacacatggacacatatagggaacaacacacactagggcctaccagagtgtgcaaggtgggaagagggagaggatcaggaaaaataactagtgggtactaggcttaatacctcagtgatgaaataatctacacaacaaaccctcatgacacacatttacctatataacaaacctgtacatgtacgtacccctgaacttcaaataaaagtataaaaaaagagaaaaatatctattaaacacctactgtatataacagcaaacatacaaaaagaggagtaatcctgttcctacttttttaggagtatataataataacaatgttgttcttttagataagtatattgagctataaactctggagactccatagtagtaaaaatgaaatggaggtgttgaaaatgcaaattatcaacaaaaattattttgtaaaatattattagaaatgctgcaccatattttaatgatgacaccaagtagctaataagactatatgcagtcaaaagttgggaaatagattagttacttatttgtcaaacttttattttgaaataccaaatctttctgactaggcaatatcatagcatagtatcagagtaaaaaggcagcagaacgacttgtaatactttcttttaccccacttgcagccaatgtccagagggatatatgtgtgtgaaagctggtagaaatcccaattatggctacacaagctttgataccttcagttgggcttttttgtccttgtttcgactaatgactcaggacttctgggaaaatctttatcaactggtgagaactaaagagccacactctccatttaagtaaaagtatacaagaaaaccaattgagttatgaaattaaaaccggatgataatatagtagaaagagcagaacttgaaacgagacttgagttcctctatcctattgattataacacatactgagcagagtgatgccaaggattgcaattctctcccatttcttcttggctcaaaacctgttccctacccttctcagacacagattgtcctaaacagaaggcacattctcccttcagccctatctaccccctcaaatattatccctcaggtgggaagtaatgaaaatgaaaaagcagatatagaaagataactttggtctgttccttgactttcctaaaggctcaggtcgttaatggaggactccatggcattttattgactgtttcattcttggtgaatacaaaaattctgccatagaaatcatagtgtgaatgcataagctagaagagaaggaagaagctgaagttaaagaaacaataaaaaaaaagtacagggtgctatgaccaacataattactatttatatctgagttttgctagacacatgagtaaattgaaagttgaagccaccacttagtgaaataatattgagaaataattctgatatttttgtttgcagacattacgtgctgctgggaaaacgtacatgatattttttgtattggtcattttcttgggctcattctacctaataaatttgatcctggctgtggtggccatggcctacgaggaacagaatcaggccaccttggaagaagcagaacagaaagaggccgaatttcagcagatgattgaacagcttaaaaagcaacaggaggcagctcaggtaaagctgccctgtctcatggcactgaccttttatcgttctgattgttacgtaatattgaagagaaagtgagtacctaagagcaggtggttgtatgaggaattaataatgatttctatattttgatgatccacttacttttatttagtttaattattttatttgagatgtgtataataataaccacaatagaactctctcatgctattttaatcatcttaagattctcaaagtaaagggaaaatgttattttggggtattttcaagtgagagacttttattcaatgagtagactggcattaggaggaaatcatcttttcttagaacaagaaattattggttatcatatgaagagttgctcctctagttcttaaacatagtctccttttttctttaactaaaaatatgttggcttttaacgtggttgctttattacctttataaggaagtgatcaaataatataatgatctctgatacagcagcatccaatagacatatgaatgttaccaatcttacacagattgaccatctaaaaaggattacttgtttttatagtgaagtgttagtcctcacagtgtgataaatcataaaatgcctctcctatctctctcatctttctgtttagcatacaaacttattgtctttactaaagaagaaagttgtttcagaaatattaatttatatgcaagagtaattaatttatcgaggttaccctgggaacaatgataataataaaaaagtgtcaacttagtaccagtacaagctataatcaaaaagcattgttttattccatgcccatgtgccccttaagaaccagtactgatttgaagatggtggggacagtttttggagaactggatgtcttatcttgctcagcagaaactattgattctcccttccccattcttctggatattgtggatgggtgagaaagggattttataactgtccataaataggattaataatattttgagggtattggacaatccaatttcaataactagagaaaggacctcaggtccttatcccattcccctgccttaaactcatcagcttttcttccatactcgagtttctttttcggagaaaagaaaacaacactaattaaataccaatttttaaagtaaatcaaatcccaaaaagtaatgaatttattttcttgttgatacatgttggatatttttgaatacgtggtctgtggagcattaacagagacataataaatgttaccatggagcaaactaaattatctccaaaagccttcattaggtagaaagaaaaaaaaaatctcctcttatacttgcagagaatcttctctgtgagatgatcttcagtcagttcaatatattttttaaaagccatgcaaatacttcagccctttcaaagaaagatacagtctcttcaggtgctatgttaaaatcatttctcttcaatatagcaggcagcaacggcaactgcctcagaacattccagagagcccagtgcagcaggcaggctctcagacagctcatctgaagcctctaagttgagttccaagagtgctaaggaaagaagaaatcggaggaagaaaagaaaacagaaagagcagtctggtggggaagagaaagatgaggatgaattccaaaaatctgaatctgaggacagcatcaggaggaaaggttttcgcttctccattgaagggaaccgattgacatatgaaaagaggtactcctccccacaccaggtatggcactgctgagtttactgatgcatggttgaaaattaaaacatgggagagagggggagaattagaaaatggactcaggaatttttatcaactgaatcaaccactgttgtgttatatttaaacccatcccttcttcacatagttatgcaaaaactttactccacagatatgtaagtctacagctcggtgtagttaagataacaccaagttgacagtcaggagaactggactgtcattctgatactgtctgctgatatttgtctataactaatgacatttaatctttttgatcctcagcacttttaagaaaaaaaaaaatgtggaactccggatagtcgatcaggaatgtccttaggttattttatgattttatgttttttttccccctaacttctttataagtcaccatgcatgcttctgaaaatattagtcatggtacacttgatcaaaaggcacatgactctgaatttcagaagtatgaacttcaagttccaacaatacaatgccttataggtgaaaaagaaataataattaaagtgattttagaaaggtggactaaagtaaattgtgaggagtgttgaaagtttttgaaagacaagatccataaaaaccaaggtggccttgttaaggtcatggtgccagtgttcactgaatgtttaccacgtccattgccatattctaaggatgtttccctttgaacttgagaaatggtcgttcagggtgtgtgtgtatgtgtgtgtgtgtgtgtttcaatatgttaaggttgcaatctatctcctcattctttaatcccaagggctagaaactttcttttatcaaggtaatttaatttaatgtgaatgcacataaaatgagaatgataatcaaaaggaatgaaccatattctgttatgaatgctgaaatctccttctacataatcttgcaaaatgaaatcacattcaaatgtccatattaatatgactttatttgtttgctctttcaaacttctagtctttgttgagcatccgtggctccctattttcaccaaggcgaaatagcagaacaagccttttcagctttagagggcgagcaaaggatgtgggatctgagaacgacttcgcagatgatgagcacagcacctttgaggataacgagagccgtagagattccttgtttgtgccccgacgacacggagagagacgcaacagcaacctgagtcagaccagtaggtcatcccggatgctggcagtgtttccagcgaatgggaagatgcacagcactgtggattgcaatggtgtggtttccttggttggtggaccttcagttcctacatcgcctgttggacagcttctgccagaggtgataatagataagccagctactgatgacaatgtaaggaagttttaaatagttcaggcatggctggctcactattgctgcaccagccagtgtttctacagaacggcaaccttgagaatgattcctggttggtcacgctgtgaatgcacctgcatcttgtaatatctttaatagactaaccaactaaaacttaaaaccttagcagtctcctgcacaaacctgaatgcatttacttattaaaagtgctaaggattgattagacacaataattactgcctccagttggaggatttgctatatacccacactgaatttagatagcaggacattctccaaggctctggtatgaaagtaaatgaatgattctatgtttaagtgtcaagggtatgtaataaatctttccaatggattcttcaagatctctgctttagtttagattttcaaaaacactgcttaagtagatagcttcattgttaccttaatactcctagtactcatatttttcttactaaaaaatgctgatataggtcttctcaaaattaaatgaagagacacaaatacattattaatacagacagataaaataattgtctgtgtacaaaggtatgttatgtgtttgtggatgtatactcagatgaggaatttctaaacagatgctgcctcttcttagactgtttactcacttggaaatatatcagcatgaggaggcatgactaagtcagaattagatgacttattgctttggtaccctggatgaaactgttgtccatgcagcatgtgtgtgttctttttaacatagagtttgtgttgtcaatgaccatctacatcttgtgtccagaaaataagatggcagctaagtgtgttgcaatcatttatacttccttaaaattaaatagctaccttctcaaaaatcaagtgccttgatcacttgtaggacttttaagttactaggcttttactattagttcagaaataagggtaataactgttaaatatatctcttaagagttttatcaactatattaaaattattttgtattttataaaattatgaaatcaggaagttaacatcttggtttttgctgtatgactaaatggttaacagtttgaacattccaggctaatgatacaataagtcagaaatatctgccatcaccaattgaatatgaaagtgcatgatgcatgtgtttcatgaaattcactgtgtcaccatttggttgtttgcttgtcatattgctcaaattaattgtttaatgcattagcatttttttttacagggaacaaccactgaaactgaaatgagaaagagaaggtcaagttctttccacgtttccatggactttctagaagatccttcccaaaggcaacgagcaatgagtatagccagcattctaacaaatacagtagaaggttggtaacaaattctattttcgtttcaattattttcaccaaacttatattgtctcatttcaaacaaatatatttgtgagttgggaatagtgcattctaatgaaaagacagtctaattcaagagctgttatttcttatatctactcagatattctagaagccttaacaatttattttaaaatgagtgatattgggactaagaatgttttcctaactgtgtagcaactctttgaaaatgcagaacaaagcatttctgttaggggtttctaatctcattagtcatagtgaccctctttttgttccattagtttaagacttcagcagtacagcccttttcagcctcatcctaagtactctcaagattgtagaggaagagcaggtcattttcacaaaataaaaacaagctaaaaagatgattcttgggtcacatcaatccctattctagctctcatagtctgaggttgacaatgtagagtcattcacatagggttgcacacacaatatctacaccaccctaaaccatgttcccattgagacgtcacatgaaagaccactcatttaacttgaggccaagtgctgagccacaatgtcagtgcataagacaaaaaactacccattgttacctgggctctatgtgtgtgtctgatgaaatatccttgggaggtttagagtaaactgtaatttttttaacaagtacaaaaaaggttgtctctgtaacaaaaatgtgttgattactgaaaataagtttagtggatatgaaataaatgtgtgtgtataaagtataccttttggtggttcttttttttttttttcttaatctagaacttgaagaatccaggcagaaatgcccaccctgttggtataaattttccaacatattcttaatctgggactgttctccatattggttaaaagtgaaacatgttgtcaacctggttgtgatggacccatttgttgacctggccatcaccatctgtattgtcttaaatactcttttcatggccatggagcactatccaatgacggaccatttcaataatgtgcttacagtaggaaacttggtaagcatattggaaggtaaatgtgtttagtcttcaaattttctgcttgaaaaactgtttacatttaattgtgtatagcagtctttcaaccatccttcatgcttcctggcccctgcaaaatcgcaattatatttagctggctatactctacttttttgccaaaaataatcacccttaatgtgctcacaaaaactgagaaaggcataggcctacagcactacttgaaaagtcaacagcaatatttataatttttcaggatccagaagtagctcatagattaagaacatactttttgagatattattacaatttcccttactgtagaagattaaaataaaattgtggatctcttttatccttcttagtcatcatcactgcaagaaataatttaacaactcaaaaatgtctccagcttttcctcttccaggatctaagtagtacatgtattgtttatccatctattctatatcaaaaccatgaactattgaaaacttccagtacattttgtgtgttatatgattacaaaggtcatttttggtgaagattgccacttaatttttcctttttgtgcttcaaaaacataaattattaaagtgtttgccagtcaactcaacttaggaatactagcttttatttgctgaaggaaagagctatctaaagtaatttatgcatttcctgtaatatttggtttgaagtttaggatttttgatggtagaaaacaaaagcatcatgcataacaacctgcattttattagttatatttttgaagttctactatttatactacagaagtaaatttatttttttcatgtgcataacaaagaatgacaatagtaatgcacctagtataatagataagaatgtataactctgattgagggaaataggaataagcttatagataaataaaagtgctcatgggcaaaatgttgtcagtacttgtggtatataaagtctggacaaaaaggtagtttggtataatggaaagagcactgttaaaaatagatgacttgggctgggcgcagtggctcacgcctgtaatcccagcactttgggaggccgaggcggacggatcacgaggtcaggagatcgagaccatcctgcctaacatggtgaaaccccgtctctactaaaaatacaaaaaattaggcgggcgtggtggcgggcgcctgtagtcccagctactcgggaggctgaggcaggagaatggcgtgaacccaggagcttgcagtgagccaagatggcaccactacactccagcctgggcgacagactgacactccgtctcaaaaaaaaaaaaaaaaaaaaaaaaaaaaaaaagatgacttgtactcaaatcctagttttgccattttcttgctgtatgatatcaagcaagccatttcacccatctgaagacctcagtttccttatctgtaaagtaataattgtatattatctacttcgcgtttccacaaggataaaattaaataatgtatatgaaagtctttcatcaactacaaattgccatacaaatttaagttagtaatagaatcattgtgggaaaatagcataagcattatgttctaagagcaaatcttatgtcatgtatgttattatctggtggaattagattaattttgttttgatcttaggttttcactgggatctttacagcagaaatgtttctgaaaattattgccatggatccttactattatttccaagaaggctggaatatctttgacggttttattgtgacgcttagcctggtagaacttggactcgccaatgtggaaggattatctgttctccgttcatttcgattggtaaaaaaaaaaaaaaaaagcaccaaattcaaaaacctttctaacaatcagggttcttgcatagcaatgtcatagtttttttgccacacaaccattagcattgtaagtttttctgtaacatttgcattgtcaaaaacttttcctacatggaaaaaaattctcaattatttatgaaaacctttatttcaaagaacatagttacgtaaaagttaacgtattactcagttgctattttcactaagtattgcttctagagactactacagttaatatttctagacctaagaaaatatttttaatgaaaatgcatcaccttttaatagtaacttgaaaatatatatagccctttgtagcagtggatgaaaatcagatgtaagatgtgcatgcagaaactttttctaattctgtctctggaaaatatgcatcttgcgaaagtcaaaggagagaaagtctgtaggattactaagcatgcccattaattcacacatatatccttacaagtcaggaaaataattgtagaattataggaaatattccaagtttttcaatgcaggtggatgtaactacatgaatacccctaaggagcattaatgaataatgaacactttacttatatcagggctcagtatgatgttactttgcacactactggcaaattaatatctttcagcagagatatttcagattcagatgttaatattataatatccggccttagaaccacctttataaaacaaattaagaacagttggattccaagtactcattaaaaattcactataagaggcctggcttggtggctcatgcctgtaatcctagcactttgggagactgaggcagttggatcacttgaggtcaggagttcgtgaccagcctggccaacatggtgaaactccgtctctactatatatatatttaaccaggtgtggtggcacgtgcctgtagtcccagctacttgggaggctggggcaggaggatcactttaacctgggaggcagaggttgcagtgagccgagatcactcctctgcactcccgcctgggtgacaaaagaaaaaaaaaaagaaaaggaaagaaaaataattcaccatcagagaaaatgatctacatggttaaaatatggaaaatccagcttttcctagggagtccaaaaattagccatgagcctgagacggttagggcagatcagatattgtaagatattgaattctaatgaccatttctaggtaaagctcaatatatataatgcttttaagaatcatacaaatatatattaatctttcattttccagctgcgagttttcaagttggcaaaatcttggccaacgttaaatatgctaataaagatcatcggcaattccgtgggggctctgggaaatttaaccctcgtcttggccatcatcgtcttcatttttgccgtggtcggcatgcagctctttggtaaaagctacaaagattgtgtctgcaagatcgccagtgattgtcaactcccacgctggcacatgaatgacttcttccactccttcctgattgtgttccgcgtgctgtgtggggagtggatagagaccatgtgggactgtatggaggttgctggtcaagccatgtgccttactgtcttcatgatggtcatggtgattggaaacctagtggtatgtacccacttaagatatgcattttggaaatacaccagcatggcacatgtatacatatgtaactaacctgcacattgtgcacatgtaccctaaaacttaaagtataataaaaaaaaagagtataatttaatggtgactgttttgtcaaaaagaaaaacaaactatgattattggtttaaaagtccattaccttggatatattatcactttaacaacacagcaatatagcagtgcccctgcattttttataccaaattctattttgtcagtcactttatcacattttttatgtgaattacaatagagtatcatattgagatgagcctaaaaggatgtgctgggaccattttataaattcagagccaaggaagagagaagtctaaaaaaagtagagagaaagtgcaaaattaccatccagactaggactaaaaagtggtgtctttaagagttcataatgcttgtgccatttctttgccccattgcagcatatgatattcaatcactctatgtcatatggcagatgcactagccaacctgagttcatcagttctcgaatggctaatgatgcctgagattaccataatggagtaactgatcaatctttatctctcttaaatttggagtgttactgtttatagtatagtaatacataaaatattctaaaggtatgtacattcatgtgccagtctcatggaaatatgagagattattcataaacagctctacttagtcaacaatgaagtatgagaaatataatagattaagaaaacaagtgtcagcctatgttaagctcctaatcttcattctgagttgtaatggttatttttcaattgacatccaatttaatatctttgtttattgaaaaattatagaatgcatttaaatgcatacttggaaacattagtgatttttaagaattctcgtattgtacacatataaatctgttttcttctactcatacaattttagagttaacaaaaccttagattagctcattcaatttcactttacgaatgggagaacttgagagcaacagaaatcatgtctttgtccaaggatgtgctattgagccagtcacaaattcagatcacccatcttctaatcactatgctgtggtgtttccttctcatcaagttttagaacttagagttttttccacacttaaaagaaagaataagtgattgtaatctgctcttccctacattggtgtaaaattataatcatgtttttgttgtttttaaggtcctgaatctctttctggccttgcttctgagctcatttagtgcagacaaccttgcagccactgatgatgataatgaaatgaataatctccaaattgctgtggataggatgcacaaaggagtagcttatgtgaaaagaaaaatatatgaatttattcaacagtccttcattaggaaacaaaagattttagatgaaattaaaccacttgatgatctaaacaacaagaaagacagttgtatgtccaatcatacagcagaaattgggaaagatcttgactatcttaaagatgtaaatggaactacaagtggtataggaactggcagcagtgttgaaaaatacattattgatgaaagtgattacatgtcattcataaacaaccccagtcttactgtgactgtaccaattgctgtaggagaatctgactttgaaaatttaaacacggaagactttagtagtgaatcggatctggaagaaagcaaagaggtaagattctataggtgtgggaaggtatgaatacatatacatatatacatatacacacatacagatgatcctcagcttaatgatgttttgacttaagatttttttttttttttactttatgataatacaaaagcaatagccattcactagaaaccatgctctaaattttgaattttgatcttttcccaggctagcaatttgtggtacaatatactctcatgctgggcaggggcagcaagctgcagctcccagtcaaccacgtgattacaaggataaacaaccaatatttaccgtacagtgtactgtattcaggaaattacctgagttatccaacagtttattataaatcatgctttcctttagatgattttgcccaactgtaggctaatctacatttcctgagcatgtttaaagtagactagggtaagctataaagtttggtagttaggtgtattaagtaagttttgatgtacaatattttcaactcacaatgagtttatcaggaactaacctcattgtaaattgaggaacatttacaatacatgcattatattgcctgtatttattattatatattttccatatagatttttttgacatcatgtaaaattttatttcactgaggaacaaaagatttaactcggaaatgactgataaattaaagggtaatatagtatacgtgtgagttttctcatccttagtaatggatatttgttagatgaatgaatgaacgatctaacaaatagacaaacatcatcagatttaatccttacaataacctggaaagaaatgtgttattatgttaacttttcagataagaaaattagcttagggagcattaggtcacatagctagtgaggggagtgccgagagttgaacttagagcccttgtttacaagttctgtttattgttttttgcatcacattggctcatgtacattgaagagaacttaacaacaagaaatattcttgtagctccttcaactaaaattacactgccctatgcattagcctgtttggactgccataacactataccataactgggtggcttaaacaaccaaaatttattttctcatagtccagaaactggaaagtccaagatcaagataccagcagcatcaatgtctagtgagggctcactccttgggttgcagacagccacctccttgctgcgtcctcacatggcctgtcctcaatgcatgtacatggaaagagagagaactctggtgtctattcttcttcttataagtgcaccagccctatcagaataaagtccaacctgtatgacctcatttaacctttatcaccaccttacaggccctatccccaaatacagtcatattgaaggttagagcttcagcatatgaattttgtggagacaaaactttaatccatagcaacctactttgaaatattaagttaaaagtctaatggatatataagataattaacaaggagtctaggacaaagcacctttacttcccatttagtgtttggaaatctcaaaaacagcagggtgcccatcttttaggctgtatagtctaaatattttaaaggattgaatacattaaagacattttattagagatacaattctattagatatcatcatgtccattgcattttgatagttgtccatggaagataccacaggtatgtgacattcttttgatttagtgactatatcccttaaaagatgcttcaagtatttataatgagtctctgaataatctaggtcagcctccacttttaggagtagggggctaatattggagctggaagcagctgccctgaccctagcattagagctgcttagttaattcagatttgtttgatgagagaagggaaagaaatatagtgcagagatgtaatagtagatagatcctgtcacatttccatgtctatggaaatagattcaggacaaaaaaaaaatagactgtttttatcaaatattgtggacttttttacagaaattttaatttggatattatgtcagttcagactttgtttatttgagttttcctaaggaatcagatgaaggctaattttttgaaaaattgttgtctttataaaattgtttctgaacttctgttaaaataaatttagtaatagcctagtctagcttcctttgtcttgaatctttagacctacatttagcatttgatgaggactaatggctaccatatgctatctgttatattaaaaaggaaaaagactattttacaaagaccatccataagatatacattttctgtaaaaatttgacatgattcttactcttattgtttttttatattgatcaaggctaaaagaaacactaacctttttataaagcaactatccactgaagcactagaggtagttctgtttctttctactttgtggtattttatatcttggaacattgcattaattgaaattttaaatgttaaggtaatagaaactttagagataatttaatgtggtgcttctcaaattgtgagtcatagtttagttagacttgagaaatccctttaataggccagtttttttttttaattttaatgaaatagtgatccgcccacctcagcctcccaaagtgctgggattacaggtgtgagctactgcacccggccaatgaaatagaacagaataacgttagagcacatttcatgtcagagggagaagtcctggtaaatgaagcttttgccacctgtgctgaactttaatgttttgtttgtctaattagaatgcaaccacttggttcatgggcatagtgtctgaagtccaggagttcttaagcttcagaaagactgtttcagctttttgaaggtagtgataatgaagccttcctaaccctaggcagaacagattgctttcttttttggttcccagagatataaggcatagagtatagtaataaataatgcatcttcttgactcatgcgtcttacaaagtactatcatattttagggtagctacttatatgcatgcatgtctctccttttatgtggtgacctacttaaacatgtttggtacaaagtagacactcagatcaaacttttccagctcattcaactcttcttaataaaaccattctgaagggctctcataaatactttctctgattagagcatacttgagattgtcattttaattccaattattttggaccaattttttctctagattcaagattcacttgagttagattttgttgtttttgtttttgttagccatgttaccttgtcactttacaccacccttctaagaaagtaataatctctcatcttttccacatgaattgctgttgaaatgcagttgtatctcatccagacgaaattttgtaattaaatactgaaacttctatttatcccctaatgatacatttcaatttcttttattcatttttgaatctggctttctttttatattctttcacagattaccacattgtatcaaatttcctggcacttttacttcacaattcctttcttcttggtcagaaataaacccacacaatattgtttgccctcattgcttcatcagtcttatactgtattctgttcatcaaagtaaggcataaattatgagatattctgcttttagaggaattaagctgacagcagatgccccaatagatgaagagtctttgttctacattaggaatgctgcctgtagtatattaatctcatcattttggttctttttgttttagcctttattctttttgcctattttcatttatttatcagttatcatatgccagggagactagataaaggagtatactaataagctataaggaatgattttctctctctgtctctgtgtgtgtgtgtgtgtgtgtgtgtgtgtgtgtatgactttcaacctttaagtatgaattttcatattgagacatatgttactgatgcaaaaatgttacctttcatggcctctattagactagtttcatttgaacatgttattgtttccattcctgaattccagtaatgacttatctacaatgcatcattataatacctccaaaattatattaatgccttgtgttaaaattacaagtgcccactgtttattcttcatacactaaatatttgtttttagacatgtgaggccacagttataaagttggtaaatggttatactctggagccagatactgggttatataatttcattttagccgcttactgtgtgactttacctatctaataatcagtttcctcatctcaaaaatgtgcataatgttactgactgcatttctgggacagagtattaaatgagataataaatgtgaagtacttagcacagtgcctaattaatatagaatatctggtaaatcatcattattattgttaccagttgcattccacactgttccagtaagttttcttacaagaattactactggtaacatactccactatttgtctttttttgttgtttgccttttgccctctgtaataaattgttttataagtttatctggggatggtgatacattttatattttctgtttatttttaaattgttttgattacattcttgatatggtaagctccttaaaatatttaagaaaattacttttctaaggggcattccaatcaggaaatacaaacatgcagaaacctaaagacaggaagcaagaggatgtatttggagacaattagtagtttggaattccgggggcgtaaatcacaggagctgaggatgagatgtaggtaaagagtcttggtttccaggaagcaagaatagactggtatgaagagatgtggtgaactggaacctcatatttattttgcctcttacatctgtggtgaactcacacctaactatcctccattccagagcaaactaagggctgttttttctacaccttcctcctattggtctccaaaagaagaaagggaatagcatgagtcacatttcatcctctctttaagtcctaagagacttcaaccttcaaagtacattcaagtaatttgaggaattgttttttaaaacctcagaaaatttcttgactcatgccatagtaggaataatgataagctagaaacatgaatttttattgaacattaataataaagaatggtgacttggacagatctgagagagctttgaaggctgggcaaaactgccaagactatgcaaaagacaatataaaatcttatctccccaaatagaaagtaaatttattttggttttggatagtattttataacatttctatcctccgaagcacctaccacaatgctgggtgcataacagttgcccaataattttttgaggtttggttgatttatatggatactagattaagagcttataagccttaactctactatgagcaaatcgctaaatctatattaccccgtttcctaatttattaaatgagatatctgtcctatgatgcttatagaaatgttatgaagatctaaaagctatttggaagttaaaaatgttcaaaagtgtaaggtgatgtcaagaaaattactacttaattccatttaaataaaaattttaaataaattgagttattaaagttgtaccttttgggaacaaaaaaggcacattactaaagtaattataaaagaaatacatttgtttttgcgatgagtgagctctagaataatgagtaaaaatgtgaggtccttagtaattcaggttatgttaataacagctattgtttaaatgttcaccatggacaaagtactattggagggcatatattgtcccattcagtctttatgccgtaagacacactgttattccagccttaagatgagaaaaataaacatattttgaacaaaggaaaacttgccaaagttacacaaacagtaagtggttggtcctggcagtctgctccatagtctgctccagagtcacgctcttaaccgctacactaaatcttaatagtgtctgaaaatgtactttctttggcatagttctgaaataaataatactatttgttgaagaactaggtacaggtgtcaactatagatttggtgttaacttccaatcactgcacattgggcataggttaacagcatagtctggagtgtttcagagtcctcctgcttagtcctgaaaggtcctgttcctctggtactggcctgcactttaggctgatctgcttctgcatcccacactgacctgtggtggtctaattctacttagagagcacttagtctcccagagtgtgatagttgtgcttaaggagcatccccttctgagtttaaagctgctggaagagtcttccaaatcattaggaagaacttctatgatgtatcattagcttatgaggtctttgagaacaggaaaaacactaaccctgtcttcccttaagtccacagcacatacaacatatttattaaatgaatgaataaataggtgatgggcagttacttctagatttccattttttcccaattatatcactgatatatatgcattttaaatctacttgttgctttgctgatatttttccatctaatacttttatcttacgttatatgggttaaggaacatacgacaatctccaacctaagcacatagtctctaagagatggcaactactctctgcgaagagtactatccatggaacccaagagtactatctccactacttctaattgatcactagggactgccaaagctacctatctttgtccacctctctgcattcccaaggcctttacccagtgtcagacctccatcatcttccagttttactgctacagcctccaaacgggtctcctctcgctagtgtagtcttgacaaaacaataggtggtctttctaaaatgcaaatcccgtaaccgttctgtcctccctaacctttcaggagttgcccattgctcacagtatggagtctatactacttaacatgggtacaagtccctgcaaaactgaccaccgctgactccttcagtatcatggaatagtacacctcacacctccccacccagctatactaatctttcattcaatgtaattccctatgctttatcagttctcatcgttataccttttctctctgacaggaatactctcttactctatcctgcttcacctgactcatcctcacccaccacatccttcttgtcccaaatgtcactttattctaccctgtccttcctagattgagctaggtggtgttctcaatatactctatactactcctattagagtgtgtggcaattgcttctctgtatcctccatctgattgtgaaccgacgagggcagatactaagtctattatgttcactattttatttttcaagtcctagttttgatgcctggcacatttttggtagtgaaaaagttcaaatatcaataattacacctattacaaacaatacaatactgtgatggaaattgttaccatttatcaaataagcatacgccaaacgttattcatgtgttatcttgttcagtccttataacaaggatgtgaagtaagaaccattttacaaattagaaacctaaagcctaaggaggtcagaataattggttaaagtccataaaaccagtgattgtgattcaaactcaagtttctctgatcctctgaacagtagtactttcaactctttcattatatagatatacagtttatttgcccagtagacacttattaagtatgttataatttaacattaaaaatcaatgtcaaaataacattatagaagctctgtgctcaatttggcaaaatgaatttaacaatgaaaattactcatttgatttgcattttggtttctagcttggggattataaatgcaatttttcagaatttttttgttttctttccaatttttttgtattaccatgattttctattgactcaatatgtctgaaatatgttgcttttgttcccttatatttaattattgatacagaagtttatgtgtgacctatcgaaagcaaaattcagagtagtatattagagccgtattcctccacgttcacttttatactgggcaagtgtttgactaaagaatagaaacaactgacattctgtaaatatgaataatcactgaagattgtcctttcaacatacagcttgatgaagaaatcaactgggaataatgtgggaattaatgagttaatatttgagttttctagctgccctgtggaaatgttgagtctcattacagtgtcttttccattgatattatattttcctttgttgagagtctttaataggggtcattttaatttttaatatgcatagtgtacaatagaaatatttactagtgcacaatgtacacaatgaaatattaatactagcatttctgaggttgtagagaacctcattttagcatgacttaggagatatatgtgtcacaatagtaaagtacccagcattaaaatagtacctgtccagctttaaaaataagtactttggataatattctttatatgttaaatatatacatgtgtatgttaaatatatatattaaatatatatgtacacacatatatacatatacaaatatatagacatcgcatgaccacatattaagtatgcttttgacccttaaattccagatttatttatattacttattataatttgaactcctactaaactctataaataagctccttataacaaaccaagtttaaaaataaaaatataaacattgtaggatcaagtcagagaacaagaaaaaaagcatttaatcacttactctcagagaatattgaagaaagttttctttgccttgctttgttttgccttaccctcaaggtcaaaatcatttgctatagtaaagagcattgttaaaaaacaagaaatttgcataaatccactgcggaggaaaactgctcttaccatcagggttgtagttattaagtggttattgaatgccctggtgtacaaggcaaagtggatgcttcatatacaacgtggtctctgcattctgtcagctcacatattaagtcagcctgccaaaaatacatggatgatacaagtcagtgtataagtgtataatttagctattaagattcatgtgtgaaaatatacatattcttaaataaactagcctatttagaaattggtaaaatttaaggttgattcatggtttaataaacattaaaatagattttaagaaatattccgggaggccgaggcgggcgaatcacgaggtcaggagatcgagaccaccctggctaacacggtgaaaccccatctctactaaaaatacaaaaaattagccgggtgcagtggtgggcacctgtagtcccagctacttgggaggctgagacaggagaatgacatgaacctgggaggcggagcttgcagtgagccgagatcacgccactgcactccagcctgagcgacagagcaagactcagtctcaaaaaaaaaaaaaaaaaaaaaagaaagaaagaaagagaaatattccattaatctctaaaacagtgagaacaaattactttattagtgaatagcaaatttcaaaatgaaattaaatttcaatctaagaacaaaaaaggaaaaattaattggccttactgatttttaaatctgtaaaaatacttatttgagaatattttagttttgccgttattgaatttctttagaattttatatgaattcgtatttcatgtgctaacatagaggtggacttttcctacacatctgaagaggagcttttccttccctttttgagtatttaataataatagtgttattatcccaatcaaataaagaattggaccacttcatcttttatctcaaccgttataagaatatattgatgcaaatatactggttatgaaggttttaatacaacttttttagcctatggtaaaatattttaaaaaatagatgacaacatttagattttggataatattaatagcaaaagtaaatatgactgtatattatctcaaaaaacatatttacagaaaatttttattttcaagggttcatggaatatttctataaaagtaaccatatactggagttcaaagtaaagctcaataaatttaaaatagctggcatatagggttatccagtcacaatgtagttaagcctgaaattaataataaattgatagaaagaattccaaccatttgaaaattaagaaattgcctcctaaacaaatattgaataaaagcataataaaataccaaaatagctatttcaaaaataaaagcattttatgtcaaaatttgtggaagaagaccaagtagtcattaatatgacttaatattactaatatgattaagaagggatgaaagaacctaacaaatatctttgagaaattagaaaaggaacaaaaaaggaagaagatatacataaagagaaaaaatagtgaattatcaatgtagcagacaatattggtataacaggttatggttcttaggaaaaaaaaatcagtaagacacacaaactttggtgtatcaggcagaattctaagatgatctcaatgacacttgcccttgtataatccccactccatgagtgtggttggaacctgtggatatggtatcaccctttaattacattacatttatgacaaaaagggggatgatgctgggtgggcctgacctaatcaggcaaactctttaaatgcacagtgatttctcctgctatcacatagaggaagctgaaaagatatgctctgcctggcctagaaaaaagcaaacacccatattgtaaattgcatacagcagccatgtggccagagactatgggtggcctctagttgctgagagtggttctgggccatgagctggcaggaaagtaggaagcccagtcttataattatgagaaatgaactctgccaacgacagtaaacttggaagaagatcctgagccctggaaaagaactggatttccagccaacaccttgacatcatctcaatgagaccctgagcagagaatccaactaggcagtgccagacttccgacctacagaaactgtgagttggtgaatgtatgttaagatgctgggtgtatgctcatttgttacacagacacagaaaacaaatacatttggcaaataatccttgttaggaaaactcaaatgattttctatgtgtaaagagcaattgcaatcaaataagaacactaatactccaatagaaaaataggcaaaagaccaagcaccgtggctcactcctgtagtcacagcactttgggaggccaaggtgggtgaattgcttgagctccggagttcaagaccagcctgaggatcagatgctgtctctacaaaaaatacaaaaattagccgggtgtggtggcatgcacctgtagtcccagttacttgggaggctgaggcagaattgcttgaacctgggaggtagaggctgcagtgagctgtgacttcatcactgcactccagcctgggtgacagaatgagacctgtctcaaataaacaaacaaataatagtcaaaagagacaagtcataaaaaatataactggaagacaaaccttaagaaatattactcctaattgttatcaaataagttaatatcaaaacaatggtagtgtaatttctgcttttcaatttggccaataaaaaagaagaaacaaaagcaaaacatgaaaaggaaaacaaaacaaaaacccaggtaaataatgcattatgctgatgaaggagatccatgagacagatacttaacacaaatctcagaacatggtatctttcaataaatgttgagtaattgaatatttcatatacagctaatagtgaaattaaaagcccagctacatgtggatggtttctttgtctctaaggtgggaatagctatttgcttctccttggtcagagatgatcacaggatttttcatttatttatttgtttgtttgtttgtttgttttttgagacagggcctcactcggtcatccacgccagagtgcagtggcgcaaccacagctcactgcagcctcaacctcctgggctcaagccgtcctcccacctcagcctccaaagtagcatgcaccaccacatccagctatttaaaaaaatttttggccaggcgcggtgtctcacactgtaatcccagcactttgggaggctgaggtaggtggatcacctgaggtcaggagttcaagaccagcctggccaacatggtgaaaccctgtctctactaaaaatataaataattagccaggcatggtggcaggtgcctgtaatcccagctacttgggaggctgaggcaggggaatcgcttgagcccgggaggcagaggtcacagtgagccgagattgcgccattgcactccagcctgggcaacaagagcgaaactccgtatcaaaaaaaaaaacatcatttttttttcttttttttagtagggacagcaggatctcactatgttgaccagactgatcacaggacttttttagccacagtcccaacatgttacccagactgtgcaggcccagcagccatacccactctgaacttcctcatccttttctcctcctgagtccagatctgctccctcatcaccttctcatcagtcctcacttcatatctctcttggatttaagactgtccaaatgtatcatttcaaattctcaaacactacaaagtcatagaaaattaaagctggaactttaaagatcatctcttcattttacatatttaaaaaatgggctaaaggaagaattatttgagcaaagccacgcagaaagtaagaggtcaaaccaggtctgggtttctttccagtttattgttggtggctttctttccactactgtggcctgggccaggagaagggtgaaaaaataaggttgttggctccactggaggccataacttgttttaaaagttcttggaatagtcaattcagaaatggtgagtgacagatgtggtttggctgtataaagtaatttacatcatctacttactccatatatggatcattttaccacatgataatgtatacacatattctgcatatatgcaaataaaatgaccaatatgcatacttattgtaatgaggtatagctataaaatattcatagaggcaccatgttgaatttaaaaagagctttaaagttgagaattttgcatcctagtttgtttttttttaacctattgtgtgctttttgccaaatcaattatactatccaggtctactttaccaatctgaatattgcagttttctgaggtcatgttcaattccaactcctctcagcttctagtaaaaaacctgagtataatttgtcaagtttacctgattggtagtatatgttttcacgtagcaaagctttcacattttgctgcttctgtaagcctggttgttggtacttaacattaaaaagtcagaactactaattatttatttcttgaagaaaaaagaaaacattgtaacttttctaaaatgattcggtgtgacatgatcaccagagtgacatcccattacttttgccacattgtattggttagaagcaagtcacaggtcctgcccatacataagggcaggggattatacaagggcatgacaacagtggccagaaattttggagaccatcttagaattctgcttactacagactgtcatgaagaaagcatgtttgcagacataaagaagagattcttacatgtcattcaacatactgtcaattcttcaagtttatagattaaacccctgaaataacttttttaatacccacaaagatactgtctcttcacttggtattaccccgccccccacctagttactagtggtgttggtgacaaattctaaactttaagagcctttttaaaataatagctctttgcattagcttagtgccaagttgtttcatctgaaattgctaaatcttgaagatttttttcattttatcaccttttttccactgaaattcatgatactaaattccacataatttcccctatattcaccacacatattttttctttcatttaacatcatcttcttaaatttgggcatgcatttccccaaattttgattcaattatggttttccaatacattttcaaaattttttaaattttcatttatgtatttatttattttagaaatgggatccagctataatgctgaaattgttcccaaacttataagttcaagcaattctcctgcctcagcttctcaagtagctgggactatagggagttttccaatcttttaaataatattttaatcaaattttttcatgtatcatgcataaattagatgaaagtggaacttccctgcttgaattaaagccttcagccacttaaggctggagtgagatctctggagaacattggctggaaacacctcttctgtcatattagtaggacagatgcctttcattgcaacatacatactgaatgttggtataattgttgattgaaatttagctgtacaacttatgatctgcagatgatagactttctctaagttctaaagtacattaaagactaagcatatagcattttagaaataatttatacaaattatgtgtttaagcttaatgcctttcttgtttttataaacttactatcatctttgagaaggtctgggtgacttttatattaatgtttttatttattttaatctattgactatgtaaaaggtttactatttgtttaatttaattttaatttctgtattgtattccttatttaacatgccaatcaaaactcttgttgttccccatgttttggctaaaaacagtttagttcggtcacttgtgaacttattttattttgtttgtttttctttcctttcttacactaatgctcatttatttacattatatataaatttctagaaaaagcactaacacttctctcaggttatcatagtttatctagagtaattcattgacataagccccactgcttatggtttaatctttctaatagtcacatgtcactttttctgatgttattatgatttgaaagtaggggaaaattcttcttactattatgagaatcagggtctatcataagggttagccatgatgtggcttaccagcctccctttgcaaaatgctgacttgcgaagtagagcttaagccaaatatgaataccattttttaaatctaatttttaatcatatattgttcctgaaagatgtatacacttctctggatcccaaacattcaactgctccatttatttacaaaataaaaatgacatgtataaaaatgtcactttaggtgccttgttccagcatgggttcattgtttggagtgctacatcaatgttttagcatgagctgcacttgtaattcatcatctattatttctgtttagttttttttttcccccagaggacaaatatcttaacgaatcatataaagcaacctgaatttagtatcttctcagaaatttatatttgtaactatttaaaaagtaaatattcacacctaattttatggttttttaatgtacatgtatctatgtgggggatttaccggtgttacgtttattcaatgattttgacttagtttttataaatacaacaacactttttaaatgcatttttcaaattctacaagattaaattacacacttacagtattttagaatagtgtaaattgatttgaaaataaacataacttattcttgataagcataccattcagctggtgaaaatagaaatgtgcagatatcctaggcagtagccaacgacctgagcaatttttgcacatcaaggtcatcagttattgtattttactgagaaaactgcaagtgtcattaattttgtaagtaagtccattagaatgaagagaagttataataaaatatatgcccaaagtagtccctgtaaagtgttgaaaggggtttaaataagagagcaattattactcttccgcaatgatgggaggaaaaatcactaggagaaaaagtcagagaacattaagaagttcaccttgggccgggcgtggtggatcacgcctgtaatcccagcactttgggaggccgagacgggtggatcacaagatcaggagatcgagaccctcctggctaacatggtgaaaccctgtctctactaaaaatacaaaaaattagccgggcatggtggcgggcgcctgtagtcccagctacttgggaggctgaggcaggagaatggcatgagcctgggaggcggagcttgcagtgagccgagatcgcgccactgcactccagcgtggacgacagagcgagactctgtctcaaaaaaaaaaaaaaaagaagttcaccttgattaacatacagcttctatctgtgaaagacaaatttgggagatttggttggaactctaagttgaaaacaaaaacttcatccatcactaatatctgaaacagaggtattcatctattcattcattcaccaaatgtttgttagtcattcaccatacatacactaagctttgtggaccacaaaggtctaagtcacatgaggctagaatgaggatggccatttttatttatagttaaacaaagaaaaggtaacaagaataaacagaaatttcataggaatttggaatctgactgagaaaatagttatttcagagataaaataaggaaaactgacttttgattactgccaatgtttgaaataagtaaaagtaaacaaaaaaatttgagtctgggtgctgaaagagtgatattgcagaatcaggaatttggttaaagaagtatgtttaagattgtttaaaaagtcattacttagattgagagcatactaaatttgagtattattaggcacacctccactttcctacagtagttcagacagactgtagaatatacttatattgcttaaaaaatgttttaaaattaatttgtaaacatgtagaagatcacttgtctagacctgcgaactttccaagtgcagatattccattggaatgctaataagggcatttgatcatcttttaaatcaccttaaaatttctgaaatatggagtgactccaagctctatgcattaaaaaaagaaagcacacttagaagtatattgtatccatccattgtgactatctttggctttgccattaatgttttacaatttggagaagtaacactattcaccaattcctggatctacagcccacccatggtcccagtttgtttataaagtagtcctcatgaaatagcaaagttattcagaaacatttaacatattttaaatataagataatttagagttcatattatcttgtaatgttcatacaatcatacagttcatacaatcttatgttattaatatccactacattcttcaagagttaccaatgtaatatgggtacttacaagcgcttgctcatgtacttaaaattagtagtaagttttactttcctaacatttagtagacagggtagagttcgtgtatgtccaattgcatgccaactcttatattgttcaattttccattttgatgttattctcatattgtgttacatcatcattacactatcttggttgagtaactcaaagggataaaataggaatggaaatcatataaacttaaaactcaggtttttttgtgaattgagactctaatgaaaaaacatcagaagaaccataaatctacatgtatttttaaaaagtaattctgtaagagtgaccatcttaggtaagcatcctaaaaataaatgtctaaataagaaatataagatgaatatctgaatattaaaacttattgaactgttgatctatttgtcttcttcagagaatgccattttgaaaatgtgtcaaaaagtaacataaggtcttttgggttctcgtaattttcacagaaaatagtcacaacttaggtaagtcagataagtctttgtcttagaaaaagtaaaaaacaatgctttaattcataaagtgaataagtggtttcacttaaaggcagaataaaaatcaatgcttcagaggtatcattaaaagtagtattcctcataagaaaacaaatatggttggcaaaaaagcaaaactagttattggcaatactttattatcagtgtatcagtatactttaatatcatgcaataacaattgcatgatattactagtaatcaaggaagaacaatttttatgtacatgttcatgccaggatctaattcaccttacaattggataaaacacttatgtgcaaagaatcaatcatttatctgtggcacttacatgaagattaattactgagcaactttttgttctgcttattactgacaacctatactgatgaagagtagatttttatgctaatattctattattttgtgagtcttggtatagactggaaaactatgtggggatcagacctagcagataacaattatatatatagaaggtaggtttgctattataattctttgtacctgaatgcctctccacacaaatttattcacaggaaataatatcctttctagttcttaattaattttggcgaaaattgttaaaattctcaaattccactctctaattgtttcatgaagaatgggcatttgcttttctacagtgaagaacaatgggtgatgaaatgttgctcacatggtttttataaagtatgtaatgaatttcattatgtcccggatagtgccaatcaaggtcatttttaaaatatgaaggcacttgttgaagtgacaagtcttagcctatcactttacggccaaatgatgaatctgtgtaatgttgaggataagacataagaatttcttcagaagatcatgtgatgttatgagtagtttgattgagaatgtgactaacgcctgccactaggtgattctcttcgtttgtcagaggaagaaaccaatgacttattcctggatatgttttaaattcagtgcaaatgctagaacagaacacaaagatagtcaaagctaaatgcaacccgaaagtagattatgatctatttactactgtctatcatgttgaacaatcaacttttcagcttctgagcatagtatgcaggcctatttaatgtgttagaatgttgaaattagtcttcagtgagaaatattttataatttcaaagatcatcttcaacctgaattcacagagctatgacagagctacatgccattataggtcctaattttctgtaactgtcaggtaagtttttctattttaagaaattaaaaggaaaggaaagaaggcaactagatatggacccagacatataagctatccttcttcaagcaaatacaaatatttcggtgaaacttttactgaaatatcaacactctcctatgtatgtgaaattcatattaacaattttaatattgtgtttaatttttactatttacaatatcgtgataacgggttgaatggcttgctgctgtgtgcactggaatgcctattgtcgggtctacataagcctgaagtttagaaaatactgtactagatttgatactccaataaggacaatagatatttcagttatcagtgaatactcagctggtagcatattgttggtgttcaaaaaatattagttgaataaattaatgaattaattacacttgccaaaaacttataagccagtttgctggtcttcagaaagagcgtcatgagtttttcctatcttaatatgttagttaatattttctattatctctgccatctttgtcttctgagaactctagaaagagaaatgtgcatcccatcactattgtcaaaatatgaaggatattgttattgttgttgttgtttaactagattttgttctttcagcttcacatggcacattaacataaacatgatttgtcagaggaaactgaattttcccacacactatttatctcattttacaacacttcaggctctaaaatacttgccagaaattgaagatgtctatttaatatctctaaggttgtttattgatgtaatttttgacatattttataacaatttctctccaaatgaccacatttatagtaaataactctgaacaccttaaccatgaatcttagtaacataagtgaaaacaacaggtagtatctgtacacacaggtaagacattgttaaagaaatatgtaaagtcaaacattaaactgcagaataacctaacgacattattttcttctaaggtaagctttctctttctctcctgctccttttccctttctcttcctccctcttctcttccctgtgtcccctgcttctctaatccacaaggcagtgttttgctcagtacatgtggctgatggccttttgtaacctcataacatagcaatctgatttcaagcttacattgtgaattatggtaaaagggttagcacagacaatgattttcttatttcttccccttattcaatctctctttttctctaaaaatatctctacctcaagaagaataaaaaacaaattcatagtaataatcctttcttggcaggcaacttattaccaaaattaaaggactttactttctatgtccatctcacttacagaaactgaatgaaagcagtagctcatcagaaggtagcactgtggacatcggcgcacctgtagaagaacagcccgtagtggaacctgaagaaactcttgaaccagaagcttgtttcactgaaggtaaagaaaagaatcctaatgttaatctttcatttggagtgcagcttgtttagctgttggtcagctaaaataaatcacatataataaaatggcactttgtaatagatataattcaatcacctctaatatgttgacagacaaaaaaacttaaagtctagtgtcatgctttgattatatctgcccaatatgtggaagagattaagaacatggaggaaaaatattttagtaccatcaaaacttctaacttatatttttaaagtaagtagtgatttcacaataagttggcatcttagacactactgaaaatgatcctacacagaatttgccttaaaagtaactttctgactgctaaaactaaacggattgctagtgctaaattgtgtttctttaatgaaaacatcagtttccaataattgttggatgaaatggggaataaatactgccctagaaactctatacctaaacagtcactagttgagcctggtgcagtatgggcaatagatagaagagatatgtttttcctacaactaatatttcctgtggtctgatatccctgggaatttgaggtttggaaatatgcatactttctatttgatgttattttttcataggcctagtataccttcagtcttcttctattccctatacaaatcatgcatatcacttaatgtccttttcaaaactgccctcatctgaccatggtggaacagcagcttgttcctctgaatggctgtaagaagtatttccatttaatttacccgataatatacattatcctatgaaaactctttctctttttgaacagttacatgttacttttctatcttttttctcttcttttcctccattccttcactccttagttccttctttcctccttcccttcttttcttcctccttttctccattcattccctttctcctttttcttcaaacatatcttttcctccttttttttttttttgccttggagcagggatcctgtatttatatctttttcttttttttttttttgaaaaccagattttttttggtaaggttcttgggagtaaggtacatgttcggtgcctttttgtgtgtgtacctaagtgcctttgtgcttacaatggtactcagaagtacctgttgattgcatttagactaagtgaaagcaatgtgtgaggaaggcaatgaaaagtcaaagccaaatcatacaaattagcttttagtgaactaaattaattatgcaaattacataagcccttctaggcacatcacaaaaaatcctaaatggtaacaaatgcagcattgttggaagagatctacatttttactctatatcctttataaaagggaagttttctgcttaacattattaatgtccaatttaaagttcttttctggagtgacttcaacagagtgcaacaggatgatatggtacaaggaaaagctacctcacatttatttgtaatttacaaagtttctcttggacaataacactgtgaggcagacaaagcaaatactgtccgctagggcatcatttaaagtggctgaatgtttccacaacttcacacagctgatgaatgtgctcttactactctaggcttagagagctatgctagcaagacagagatgagcatagtaataaaaagacaagacaaggacattgctaaaggatattatggaagcagagacactttatctacttttatttcaacactttctgcaggctgtgtacaaagattcaagtgttgtcaaatcaatgtggaagaaggcagaggaaaacaatggtggaacctgagaaggacgtgtttccgaatagttgaacataactggtttgagaccttcattgttttcatgattctccttagtagtggtgctctggtgagtgagattaagaaaaggtgatacagcactaatttttagaacactctaatactgatgacttattaatcctttgtttcattgtcttagtatccaatgcatttttaattatcccaccttgtatcttctatagatttactctataactctatatttctggattaacttttactatgtatgtaaatataattttaagaagctaatcattaatttttgcttactattaaatagcccagaaagtgtagcccttcagcttattcattaacaccaaaggatgtgaatattcaattactcattgtttaattaaaaaaagttattggaagccctgggatgggaatatatattctctgagttctgacgaattttgtttctaaatggtatttattattattatctcttgatggacagtagtaagtccttagggaccacttctctgtctttttccaattgtgtgctcactatttttgtgctacttaagaaataatgaaagttggtaacaataaatattgggcagcatgcccaagagattcatttaaggatgggtttatctttataacaaggtgttcacttcatcagaatcaatttatttttataggaaaattatttataaaactataaataaaacatacagatagcattttagggaaacactaacacaaaggaaataccatagatagaaaaagagaaagaaagagagagaaacagagtttgcctgattgaaatgcaagtgtgttacaagtttaactttttataattctaacacagacatatatttacctgtaatttttctgaagaaagaaatattttctacacgctactttagaagtctttcaccgttgaaaggaatgcatacttagaagtgaaacatcgagaggttcataatagaagaatatatattagaatctaaatgaaaagtaatttcatttaatcattgtcacactgtatgtctgttgagaaacataaattattaaaaaaataacaaacaacaacaaaaaagaagcagatgaacccaactatttagtcaaattggagactgcgaagatcaatcacaatttctgctttacaaaagcacaagctttcattatttcttcaacctcctttctatagcaaaaaaaaaaaaaaaaaaaaaaagccaatagaaggaagcaaaataaatgaaacaaaaggaatacataacttcaagttgggatggccacatcaggatacaacatcaagaactatttcctgactaagtcaaattaattcattggaatcatacttttctttttcttccaccaatagtctttcccctgattaaataagtaaaagacctttgcgaggaaaaaaaaaaagtaacagtaactactgtttctctgccctcctattccaatgaaatgtcatatgcatatgattaattttttaaatagcttatggagtataattatttttgaaagctaataatgtgtaacattttctttataggcatttgaagatatatatattgatcagcgaaagacgattaagacgatgttggaatatgctgacaaggttttcacttacattttcattctggaaatgcttctaaaatgggtggcatatggctatcaaacatatttcaccaatgcctggtgttggctggacttcttaattgttgatgtaggtatcgttcatatttttgtctctgttcaaggtagcttgtcttatttatattcaaattctacaatagtgagtctcagaccactatgttatgttgacagactataataaccactaaacgcatatatgcaatgagagtgtcatttctggaagacaagggctaatttaattctgatttaaaataacattgggggatggaatctatggtagttctctagttatctgagaaagctaaagaaaaaacaacacatcagcagtttgtagggaaagtagtgaaacagggaacttaaaaggtatgttgcttaaatcctttatgttgtgagtcagacagactcaagtttgtatcccaggaccatcacttgttgattttgtgccactgagttagtttcttggccccaaactcttgacccccaacttgtacagtattaaaggcactcaataaaaacagtgatgctgttgggtgctacagtcatttaaaaaaattctatttgatctactcaaactttttaaagagtagatttaaatagtagattatatggattatgacttcattataggaagtaaggtatgtagagtgtagggaaagagaagtctactttattcagcagtgaaagttttcctagaatgtaaactagatttacggcaagcccaaacagccctttatagaatttgtatccccaatgattaatactgcatttactgaaaacaagtgactgacttcaagatgtgttaaagttaagcatcatgttttctattatcaacttggcaaaatttcagctttagaaagctacagcaaaactatcctgatttcatattgagtagttttaccccaaaaagatactaacccagcaagactatgagggtttcttgtggaaagtgtttcttgagctaagaatcatgaatgcattatatttccttgaccctgaacaaaggcaaaactaagctatttaaaaaacttaacaatgttactgtgaaatgagccaattgagagaaatctcaaaggaagaattgctttatcacatcaataagggagaaagtttgtaatattgaggtttcaagcattagaagttacattatgtttcaatttcagaattgtttacactataatttaaatctaaatgtaatttaaccctttaaaacttcctgaggttttttttctattatgtttattacacatcagctttttcatgaaagttttttagtgtcatttttgaaacattttaagaaaataattttatagaaaattttgtagtttgtaacaataatatctttattttcaatgttctgttttaattctttaatgaagatcagtatagcactctataaaaggactaattacagcacatctcaaataatgtaagaagtatattaaatatgatacaattaatacattttaaaaaagaaaagtttacaaaaatagtgtgcagtatatgcggaattctccaatactagcatctttctaaccaaataagttataatcttccttgaatacaaagttttagtaaattccttatttagagaattagatacgtaagatttttcctttagtcatgtatattacctacaaatgaatacaaatgaagtaaatttattgctgtgtgtatttggtaaatattcattgattggccctttggggccagatatcatggcagaagccataaattagtataaaaaattttgaggaagttttgtaatggaatttctttctaagttacttatgtaaaaataaacaagtgaaaatgcaaggtattaccaagacaaaatatcaccttcaaaactgatgtagttcattaatttctgagaataccaattatgattagttgaatatactgatgcacagtagaaacttcctgctttttttagtacaacagcagtttttgtattttataactagctacaagaaaagccttaaattcaacagcaacttaataaaataaaggaagaatagccaatgaatttttttccaccttgatttcttcttttattttactaatttttactttgctttttttttctatttattcagttgataaattatatgacatttaaggattttttttcaactagcttttaattaatgtcctaaaaattacatcctttacatcaaactgaaattatttctttaattttttaaaggtttactgaaaatgtctgaacatttatcctctgaataattataagcaaaaattatacttgttgtattatatagcaactacacattgaatgatgattctgtttattaattgttattatttttgtgtgtgcaggtttcattggtcagtttaacagcaaatgccttgggttactcagaacttggagccatcaaatctctcaggacactaagagctctgagacctctaagagccttatctcgatttgaagggatgagggtaagaaaaatgaaagaacctgaagtattgtatatagccaaaattaaactaaattaaatttagaaaaaggaaaatctatgcatgcaaaaggaatggcaaattcttgcaaaattgctactttattgttttatctgttgcatatttacttctaggtgatatgcaagagaaataggcctctcttgaaatgatataatatcatttatctgctgtgcttatttaaatgactttatttcctaatccatcttgggagtttccttacaaatctatatacaaaaaaaagctgatgcattattaaagtactatgtgtaatgatataatggtaatctaaagtaaattctatatcaggtacttattctttgtgatgatatactgtacttaacgagttttcctgaaaataatgtgaatcacacatgtgcctaagtatgagtgttaagaaaaaaatgaaaggagttgttaaaacttttgtctgtataatgccaaagtttgcattatttgaatatattcaagattagatggttagatattaagtgttgactgaatttataaaactagtaatactaacttaaagattacatacaaatccacatcatttttataacaataaagtaaaacacttataatgaacagaaaatataattttgactcattactataggtaatttatacattaaccttaacttgcatcttattggtcagagtcacacaaaatgttattttatccttttcaaagatgcaataatcattttccatcatgcataacagattagaaattttgccattattgacttattttccatgcctttttttacggcatgaagcattagtttatagatatataatataaaaaattagttctgcttttttttaaaaaaaaatattatcaaaacaaaacactgaattgtgtgattccaatagaaaaacactgctctttcacctcctaaggtgtagttacttttatggaaactaagctgtattgtagacttccatttgcactttgtagattgtttatagccttatgttctcttctcaagtcttattataaatgtcactttgtaagaacgtaggacttgtcttcgatttccctaacatatatgaaaactttgtcctcattatcgacaactcagaacaatataatacaagtagtcctcttttatttctcacagagagcctcaaattttcaccaaaatgttaacagaaattatctctggggtgtataagaattaagtctgttttccaattaaatgtcactttgttttgtttcagactggcagtttcagttctggagaaaaaaaatgtcatttgtgtacattctacttgaaaacatgttgcctgaatcaaaataatatattttatatggcttgtgaaatctgaacaatgctaaacatttgaaaatattataaaccttttacatttgaccatttgaaagtttattaaattcattggtcaagtgctcagatatttccatacattacacttcatttctataaaaaagctgatcttatcggtatacttttaattttctcagaaataaccatatctataattattaatcaataatgccttttatattaaaagaggttagtttttgaaacttggagttttagacataaaatccttataaatgctgatagtgatataactaatagtttaaatggtcagatttatgaatatggctctattcctcataatgacaacatacacacagcactaaaatgactaatctcttcaatacgtgtttggcattgtagagtcaaaataacgttataattgattctattttttatacttctagtgtttggatattttattttgtaaaaatataatcatgaatgatggtgaggttggatataagaatgatgattatgattgggaagtgagatttgaacatgctcagaaactctcatttaattctttgccctagcagcataaaatcacaatagctgcgtcaaagcgtaactcaggcactcattttatttttgttgttctgttattttttcaaagcatgtgcttttatgcaacattactgaataaagcatgttgtacagtgcttgataagaagttagaaagtaacaaataaattatcatcacgttgcactttgtgttttgcatgttttatgcacatttctggctgacagcttttaaacatttattgtatttcaaatttccagtccaaatttttcaacttgtaaaattaaactgagtgaattgatgtcgtgaatatctagggtaaaataaaatttgtgtttaaatttgtatttttaatttcctaacctaggaaatcttaaataccttctttttcaaaagaactcaagtcttaatggatagggaaacagacggagagcatcatgaacaaaaagtaacaccaaatgttctgtcatatcagatttctaactaataacaaactatatatttctattttgtataggataatcttgctccaacttggatggggtggagcgctggttcctcccctgagccctttattatgggtactgtattaccccttttgctacctttaatccttgcactgtgacttatgtgtagtggggtgagggagggattgggaagggtactattattgcaccacagtagggaaaatacattatttacatcctaatcccctcttttcaattgtcttaaatttcatttgaaaaaaaaaaaaacctttatgaatttaccctctgtggattttaaccccaatggttgatatctttattaagtttcattgaatatgatttagttatgtgtatatggagttatccatctttggggagattactggattggtgagggcgggggaccctggtgtagaatgattatgtgaaaaaacaatttaacttgttaagctcatgatactgtttgaggcatacagcccctgctgtttagtacattggtctgggtcctgaaaattaccagttagataccatcagttgattattgatatgtatgagcagatactagggtgcaatatttcaggtttcataagactggtattgattgtgaccactctcattttttattgtgtaagttcatatggggttattttcaaaatgttaacaaggcaaaaatatattaagaaatagttgaataagcacatgtgaattgtgttgtaaacaaaaagttagaataaaaaaatccacttatttgaattatgcagaatagaatacatacctagaaataaaacaaaaacgtcttatcatgagtattaagataaaatttaaggcataaactcacttcttagaataagtaactcccaactaactttctaggattttaaaacataacacagtgaaaacatacataaacataactctacattttatttattcttaaagtttaagtgtattatacaagaagaagagtttatattcgagagacagaaaaagtcagaatttttgtttggatcaccaatatatcatagcttacaaaaaaactgtcttaattaaaacccacaacataatttttttagatttttaagaaagattctattattcttctttatacttaaaaatggatgattcctactttgcccacttttatttttattcacatagattttctttatttctattagagaagcactagaattcatgaatagtgttgatttgaagttcaaagtaattaattcagataaaaagacatttctgcatgtatgaaaatttctaatgtgaatttgcatatttaattatcaatccttcatttagtgtagacttatttttaaaaatgcaggtaatgaaccagaaatagaattggttgtgctagagtagagaaactttatttgatgattgttttgaaaaaaaagcttctgagaagaaacaacctctagtacagtattaattcattaagatagctcctttctcagacatttcctttcatgtagcctgaaagttcaatttgaaatttgttctttccaatttattcagactaattctgcctactttcttccccccataagaaccaattactgcagctttattgagactgaaaaaagttaatacacctccttctttgctgaaccaaggaatggcttggaactcttgggaaaagacaatcttttctatgatctttcattgtctaatttaatacatcataaatatgactatagctttgtataataaactccccaatactgtgccagatgttttctaagataaagttattttatgttcacaaaaaaaataaaacttttctctgggccaaatgtatgccaactttgcaaatcatatcctgaagtgcactgctgcagagtacatgcttgcgtcataaattccatagagttcgctttaactctaaatcaatccccagtttcaaagtaaacctctcaaacatattacctaagcacaaacttctccctgtgctcagttccttaattattctcatcccatattcagaaataacatttaaaaattatgctttgatcaataaatactaatctaaactttgcttcattaacccattcatttttgtcaaccattattttattcctatattcaaagctctctggtatgttcttatattcaagacactcaaggccctggaagattcacgaacatatgtttgcatcttaaatttttagaaaatcttacaatctgtcaggattacactgaactctagtacagagtaatatgggtaccagataagtgggagcaactcttccacgtagactggaaacagcactaaatgctatttataggctactttctgaacttaacttgttttaacctcatttttctcatatgccaaatgagaacgcaatactgaattatctgtacagttctgttcagtactagaattctgattcttgaattcaaaggggaaaacattcctctttattttggaggctaaactgggggacaaagttaggctccatgaaagaagtgctatttgaactaaagcctttaagaggggagagtatttcagaagaggagctattagacaaggaatttcaatgtaaatggcatctcaatcacctggcaattatattagcacacggttattatattaattgaagtggcatgaagtatagatgaccagggaagttaaaactggaaatatagattgtggagtgatgtgaataccaaggtaagaaaaatatttgttagttaccagagagccaataaataactttcaagtgggacttggggaagattaattcatcttacatagattaaatgaaggagaaggttaggagacagatgacagtgcaagtatgaaataacagagggcagttctaggtggtgactgtgagaatggaaaagaggtggcaaagctgagaaacgtttcaaagaaaaaatgtgagacaggtaatgtgaaaagaaaatcgagaaataggtatagataatcagtgttctgctcatactctaaattgggtgttgaaggcaaaatacgtattttaattagtactctgtgtatacacactagaaacagcattgtaatctggatagtggacaaaatattcagaaaagaagggaaatagtaacttgatttcaatttccaaatctctaatctgaaagaaatctaattctattcatccatttaaaataaattatataacgagaatttatgaagtccattgtattaatgcagacagtcagatgagataaggcaaagtgtcacgtgtcagcttggtagttgcatcggccacatcatttggttctgcctggataactcaaccaaattaatttttcatactcatcccctccacctttgtcattactggtattcttattttctttggcccacttatcacactgttttatgttccccagaaggcctagagttctttacaggctttaaacagggatcagaagtataagaaattggctcatgtatttttttttcagacaggcagttaaaaaaaattgttctaaaaatacactggcatcaaatggcaaatagaagatgttttgacgactacttccattggatcagactgacaagaataatacaagcacataggtggaattaaacttagctattaatgtccaagtttgaggcagctgccccttataagcattttagggtctgtttttagcttccctcttagccactcctgtgcagctccagtgggaggtatggaggaaaaagcaaggaagccatccctatgttgtttccaaacatgaacactcaagatttttaactagtggtccagaagtaaagagggggaaaacatccttctatagaaaaaaaaaaaagtagataataattgaacacagaacttcatgtgatcacatcagatttgagaactatgtatggcatccctctttttcttattttcctaagaaatgatttctattatgtttcatttgaaataagttttttgaattaaactcagtaaatgaaacaactgacatgactggagcttgaaataaacgatgtgatgatctaatgaaatacataatgcaaattgtcttgcttcttatgcaaaaattattagtcatagcaatgcatgaataattaaagacaattatattaggtatttaataatattttttatatttatcatctgaatttttaagttattttaaaaatatattggtcaaatcaactcaggtccaaatgttttagttttgttctttaatatattgcctttttaaaatgagttaaacttctgtataggctttttaacttttctttattctgataacacaattctgacttcatctggcagcaagttcctctgattttccttttcctttaaccttttaatgcttctccctcccttttttttaaaaacatttttgtttcatttcttggttatattgcctatagttgttttcctaagtgtattgcttaagaaaaaaaaatgaattttaagatttttttgaaccttgcttttacatatcctagaataaatagcattgatagaaaaaaagaatggaaagaccagagattactaggggaattttttttctttattaacagataagaattctgacttttctttttttccatttgtgtattaggtggttgtgaatgcccttttaggagcaattccatccatcatgaatgtgcttctggtttgtcttatattctggctaattttcagcatcatgggcgtaaatttgtttgctggcaaattctaccactgtattaacaccacaactggtgacaggtttgacatcgaagacgtgaataatcatactgattgcctaaaactaatagaaagaaatgagactgctcgatggaaaaatgtgaaagtaaactttgataatgtaggatttgggtatctctctttgcttcaagttgtaagtgaacactattttctctgaatatttttattgtttggaataataacaaaataatgacatacatctattatttagttcctaagaaaaagtatatatttctttctatttaaaaaatttcaatttgttagtacaagtttatgagcccagatgggtgaaaactttattacatgtaaggactgcagatatagtcagtagtgaccagaccaaacaaagacctctttgtcttttttcttgtattttctttgtttctatattgctctttctatataaacaagtaaattaataaatcagtaactttgccattttttattgtgattagaaggcttgtttccctgatcagctaccaaaacggaatacacttaacagatagatcatcttccaaaacacatacacttaatacacctaattggattgtaattaattggtagggattaactgctgctgagttctattatttggatcaaagtttggggaatgacatttaggttttagaattagaaccaggcatagcggtgggtgccactgcactccagcctgggcaacaaagagtgaaactccatctaaaaaaaaaaaaaaaaaaaaaaaaaaagagagagaattatacctggaagcaactagaaacaaaaatgaagcaaaagcagctgttgtcttatctcaaatgacctttcagcaccattatttaagtctattttgtcctaaatattaatgttttcactactgggtctctaagactgggtctccaagaaaaatagtttataatttatatttaaaaaaggtagccctttaaacattttcatttgattctgcttctagctgcagcagcaccacaacaaagcagggaataaaataagagtccagattatttgaaaactcagcttaaaaaaaaaagactgtacaatttctttcttcccttgtggttctacagtgtctttagggcagaaatcaatttttgctcaccaaggttatgatttcaactgttcaaccagaagactaactaagcaaacaaaccaacactggtcaaaacccttttgcagctcttccagaggtgtcaactatgattactttacaaattcttcccacctttttgttggaaattcttatttctcttcttaacatttttgatctactctgaataatattcatgcaattaaaatagagattttttaaatctggtaagaacgggtggggcatggtggctcatgcctgtaatcctagctctttgggaggccaaagctggaggattgcttgaggccaggagatctagaccagtggaggcaacatagtgagaccttgtctctaaagacaaataaaaacaaaagttaaaaaaaatctagcaagaatgctttctttaaaaattgtcgacacatgatgatatttatttgggcacttattctaacccttaactaatgaccatacttgtaaatatcactaaagcaaccacctcctccataaatttgaggaaagaaaaattaaaaattttaagcaatcctttaaaatgtaagcaattctgaaaatacagtgatggtcctgcacaaagctattaaataaattctgccaccaaaaaaaaaaaaaaccctctaaaatactgcttcacatttggcttttatagaatcacctctctattgattagtaagtcattgaaatggtcccttgaatcacttttttgtttctataccaagtgtgtaatggaattgttctatcattgacctaagccactgacatatttaacacatctctctctctttcatatacaaaagccttgtactttctagctaggaatcattactttcttttcactgctgtcacccacacccttgcttagcttttgtctcatgaaatccaccacctcacaagggttagcgttatcagaacaaagatatattgtgatacagacgctaaaggctttgctaacctccctcactagctaagggataatccttttaggcccacaggactcaaaattcatgccccaggacaagtaacaaattactgtaagttgttagcctgagtatccttcatcctgtgagtgccaagtgtctgctgtactattgttcacatttcttattcatattaacttattatcttcaagaatttcagaaagaaaatagaatagggggttatttctaaatgttttgatgcaaaattcttaaaaggattgtatttctaaatgttttgctccaaaattcttaaaaggatagttgcaaccctgcctttatgtatcctggtactatccttacattgttacaataaagagaaatcttaaattttcaatcactttgatcaccctgcagataaattttagcagatgatccttagatctaagttgtaattatttggctgatagagctattgacccatgtgttggcatttgtaagactttctaaaaagtgctccagcaaattttaatactgctttaaatatcatgacaccatgaactctaaagaattgaaaagtgcttgtgagttggttatcaaggggaggatatatcaaatggccattttgttcaatatgtgttctagaaatgaaaagccatactaaaatactgtcttggtccaaaatctgtgtaaaatttgttttgaaatgtctttcaaaaatattcccttttgaaaattatatcagtaagaatatttattaaacatcaggtctaaattatttttactccaaagtaaaacatgcatgtccttcttaataggccacattcaaaggatggatggatataatgtatgcagcagttgattccagaaatgtaagtattccttgtattctaagtctttttacaatattgatcaggtggtaaaattaatcgaataaagcataaacgaccaaatgaaatgattctatcttgatttaaaatatttgggaaaaagtgtgacaggtaaatattcaagcatagcaatgtttatcagaaagatcttactaagataattcaacacatgaattattttgaaaaccaaagtaacaaattcatgtatttagtaactaacaaatattttccttttaaatattttctattttgtttcctatttatccacacattatataattagtagtaattttagtgtgcgggaccaaatttgaagaaatatatgatttctatcattagttgaaatgtatagtcaccctccatattagacagcatgaaaagttatggatattgttctgtcagccttagattactgtgatgatttctttcaaataatcctattttaaaccatataaaagaatgtttttatatgatttttgcattcataaattgactggagcctttactaatgttgcaatcacttctgtgaccaacagattcctttaagtgtatatcaccaaaatataaacctattttatttgatttcagcctctttcaggctccaagacctaaactgaaattcatgctcattccaactttgctcttcaaaactttgtaagatgtagtattttctatcaaccttcatctttctattctcaagtcccatctgtttagtttatcatcataaagaataacctctgtccctgcagtcttcaacctgatagagtttgatgttatctttcttgaagtgcatttcaaatagctttagttttatgttgaatatcattttgataacctccagagttgttttatttcactttgtcacttatattttgttttgtgtgtttagttggtttttaactttgttgcttttagaaggacatgaatctgttaaaaaactatagtgacctttcagtccattactaaattataagtaatagcccatttgttttaagcacaatctaggaattaaataatcaactgaggatttataaaatggactgtccatctatgtctacttaatctgaaaaattcaataactgttactttagggtaaagtgccaaacatctgaatgaacaactcatttcttatttgctacattatttcatgcatacatgaatgactgtttctaaacctagcctgtagatatttacagttttaaattttttattaataattttaaaattactaaaattcagtaccttaaaagcttgcaaatttagcacattactgttcaaatggaagaatattatttgtatttatagttataaaaatagattttagaatgtcataatagccatatttttcacatgaaaacatccctaaaggccaatttcagggatgttttttagaggtagttgattcagaaaaaaaaaaaatgctgacatattagtaagaataattttttctattgttatgaaaaagcaccagtgacatttccagcactaaaatgtatggtaatattttacaaaatattcccctttggtaggtggaactccagcctaagtatgaagaaagtctgtacatgtatctttactttgttattttcatcatctttgggtccttcttcaccttgaacctgtttattggtgtcatcatagataatttcaaccagcagaaaaagaagataagtatttctaatattttctctcccactgagatagaaaattattccttggagtgttttctctgccaaatgagtacttgaatttagaaacaaaatgggagtatatattataactgatttttccttcctcttcctctgtcattcactatccatatatttccggctatagaaagctaagaataactgtgttccacactcttgttcataggttcataaagtttttcctcctcttattcattatcaagaaacattttctatcttttaaaaaataataattagaataaaactagaaagcaaccgaatatgcctctttcccaaaagcaatttgttactttatccctacaactacccactcccccttgaaaatatattttccaactaattctttgcaataaattaggcactggatgtaagcttcttctagtgtttatttttacgcttttttctgtcattgatttcttttatatattcccatttctttctccaagatatttaaatacaagctatccgtttcagtcttgaattgtatgactattatttatcatttataaggctcatttgattgtcccaattacctatgtacattatagaacatatggaaagtaaataaatatcatcacttggaagtaactgctgccattcacattttgttttctgttcagagtatttctgcacatactcttattgttgtactttttatctataattataaattccactttagacttaacataagtattttctcattttgttaagtcttcatatatgcattatcataatttacttattcattccccagtaggttgataatttagattgtttttaatctttaatgatttaaatagtaccttgttgaaagttttgtacaaaaaaaaagagagagggacagaaaataaggctttaattatttcctgagaataaattcccacaatgaagtattttactcccctagagtaatataactactcaaactcccaatatcagtgtatgaacacccatgccaccgttccctcactgtcaccaaacattctgtttttgaatatttgatatttaataggtgaaaactgtatttaattttaatttttatgacttttataaccttaattgttatgacttttatgtattttattacatttgaacatgttcttaaatgctcattggccatttgtatttcttcctttatgtactgttgcttcatctcacttgttcagtaggtttgctttttgtataatgaatgagtgctttcttagactacagaacattctcccctcaattcccttttcttattaccagtagtattcttaagtcaatatcaggctactctatttcacttacttgccagtgttccaatcttctatccctactggtctgtcccatacttactatgctatgagctctgatttatcccctaaatctctcactaactcatccagttttctttttatccctttcctccaattcttgacagagttagagtgacttttttaatgagtaactccaaactgtcttgcagtatacatcctctaactctttgctacatttaaataagaaaattattgcctttaacatcataaaggtagtatgtatagtataaggtaccaagtatttattatctcagtgaaccaaatttcgccactcactaagcataaggtcttgggtaaaatacttaacctttttgagatttgggggtgtttgtcttcataagataataataataaagtcaattttgaattatttagggaattaaatattatcatacctaaagagtacaattttttttacattttaaatcccagatataattatactaatcagttgaattttgtatttctttttttagccatccattttctattttaacattgaaaaaaatgtacaaaaggacacagttttaaccagtttgatttttcttttctatactttggaggtcaagacatctttatgacagaagaacagaagaaatactataatgcaatgaaaaaattaggatcgaaaaaaccgcaaaagcctatacctcgaccaggagtaagaagtatcaaatgatatgggggaaaaatacaaaaacaaaaacttgcatgcttgtctcacaaaaaagaaagtagctaacatttccagtagaaaaaatttctttcacttgtagagcatcatctaaaagtgatgtttgtatcttttatgataatggtaacaacaaaaaaaattaaagaccaaaaaagaacaagaagaaatagaagatacacccttgacttcaagagatttagaagcaccccattacaatccatattaattggccaatggacacatagacaatgtgatgtgcacaagagaaagttaatcacacaactcaagaatggttgccaagtaatatcagggaaagaagtaaaccttgggatggggctgtaagaaatgcaatttcctaatattttaagaaatgaagtgttgagtgaaataacaccttacttctattttatttttcactagagatactaagtgttttaaaggaggaaagaattccagtatctactattcatatgtatggctatagagttaggtattactaatgtctgcagaagtcagggtcagtaattacagtttatgatgataaataacaatactcatgcttccatgatgaaataaacaaattgctatgaaaatgtacagctattatcccacactataaatatttttatgatgatgatctgagaggtttcagtaattcctagggtgcatcaaggaaaaaactactagcaaatattcatattgtgatgattgaatattgccttcctgagaatgatgagaaatatatactttctccattaaaatttagcactaagagtagaaatgaaacaacaatttaggaaaaatataagttggaaaattccctcagaattcctcagtggcccaaagaaataagcctgcagatggccttcagtgactagcagtggcagaaatgggaagcagaatcacagatcaacgacaaagaacgtgaagttttttttgacataaacatataggaaatgtcattctggtctcattatccttgtgcagtttcaggattctgtgtctgacaatgttagccaaggctatttggtagaagaatatgagtattgccatatgtggtatttaaatgcataatgttatagatgtgtcttggaaattccaaattctccttaacaattatttgagaatacaacaagtgaaatattaatagtactatattttaaaatggatgtatggtccagctgatcattggaaagtcttgaaaaaaaaattaaatgggtttcttaccttttcataatcttaaaatgttgatatgtgttgcatacctctggaagaagtatacagtgttgaatgtttcttttgtttgtttgtttgtttgtttgtttgtttttatcagaaaccttctttggataagggattgttattctgagaaatacacattagtaaatggcaatttaaataactaaattttaacaattaatatgctataaatcattcttacaaaaatcagggccaatgactactttgcaagaaactagaaagtcaattaatgcagaaagtacttaatgctaatgcacatgagaaaactcctttgttgttaaaagcatttctatttctctacagaacaaatttcaaggaatggtctttgacttcgtaaccagacaagtttttgacataagcatcatgattctcatctgtcttaacatggtcacaatgatggtggaaacagatgaccagagtgaatatgtgactaccattttgtcacgcatcaatctggtgttcattgtgctatttactggagagtgtgtactgaaactcatctctctacgccattattattttaccattggatggaatatttttgattttgtggttgtcattctctccattgtaggtaagaaatatttaaagttcttaaattcagttaaataaaagtgaaagctgaaacaatcaagattagattcaagatcatcccagcaatcagagataatcactgtaaatattttgatacattttatccaagtgtgtttgtttttttaacaaaatgtctcctactatatgtcagtattgtttcttattctatccatttagaacaatatacttagtgtaaatgtagtaaaacctcattcatttgaactagaactgtgctattaactaaaataaaaatgtttttgacatgttgagattgaagaaccaatatagtatctagatggttctgttaacaagactagaaatgtagtctggtactcacgaaaattgctttagagaatagacatggagtcaccagcatatagatattagtggaaagtggtttcaagataaggaaaagtattgcataaaaagagaataaagacaaggactaaacattagcaaatgcatatagtaggttctctgcaagtgtcatgtagagattttctagactaccttaaaaatgggtttatcataatgatgcacaagggaaataaggtggcatgggacatcatcagtactatacttcaaagcctggaacacataactagcctcatgagcaatagctcatttcattagacaaaactaaagctctagtaaagtaaaaagcatctgtctgtgggcctattcattcttccctaaacaggatgatatgattgggtcaatattttactatccaaaacgaggcacctgtgttggacagattttcatgccactcccctctctgaagaaactggccttatatccagctcattgtatatagcctttgattcccactaattataatccttggttataactagtgtggctaaggtataaaagttgtattctcacacgtctccttctctctctctctctctcacacacacacacacacacacacacacacactcttacacttcgtcttttcagaatgaggcatttaaacttgaaggcatttagtttcttgagctcttctttttaactttacaagtattgtttttatctaaaaagcaaatggagagagaagctgaaaataagaagactgagattacagtgttaggtacaggagaccaaaaagaattgaaatacaacattaagtacaggatactaaaaagagcatcaacctgggatcctttcagaaatgcaccagaacatacataaatgagtatataaaaatattagagtggaatttaagtaagtaccaagatcatggggagatgaaagtagcatcaaaagctaccaatactttcagatggaaaaggagtaaatagagaatttagaatatggcaatttcagaaaaagtcactgtatacatataaacttgtacctatactgttgggctgctactgttcggccaaatgtgcatttttaacttattttctttttaaattctgacttgggactttacataaactaaaagtagtttataaacatctcttaaagataaaaaaaagtactataatccttataattgaaattattgctgaatttcaaaattaagatttataatatattatgtacaattatatatatattatatatagttgtcatatttaatataactgggttcaggactctgaaccttaccttggagctttagaagaaacatatgtttattttaacgcatgatttcttcactggttggtattctcattgtttattcataggtatgtttcttgccgagctgatagaaaagtatttcgtgtcccctaccctgttccgagtgatccgtcttgctaggattggccgaatcctacgtctgatcaaaggagcaaaggggatccgcacgctgctctttgctttgatgatgtcccttcctgcgttgtttaacatcggcctcctactcttcctagtcatgttcatctacgccatctttgggatgtccaactttgcctatgttaagagggaagttgggatcgatgacatgttcaactttgagacctttggcaacagcatgatctgcctattccaaattacaacctctgctggctgggatggattgctagcacccattctcaacagtaagccacccgactgtgaccctaataaagttaaccctggaagctcagttaagggagactgtgggaacccatctgttggaattttcttttttgtcagttacatcatcatatccttcctggttgtggtgaacatgtacatcgcggtcatcctggagaacttcagtgttgctactgaagaaagtgcagagcctctgagtgaggatgactttgagatgttctatgaggtttgggagaagtttgatcccgatgcaactcagttcatggaatttgaaaaattatctcagtttgcagctgcgcttgaaccgcctctcaatctgccacaaccaaacaaactccagctcattgccatggatttgcccatggtgagtggtgaccggatccactgtcttgatatcttatttgcttttacaaagcgggttctaggagagagtggagagatggatgctctacgaatacagatggaagagcgattcatggcttccaatccttccaaggtctcctatcagccaatcactactactttaaaacgaaaacaagaggaagtatctgctgtcattattcagcgtgcttacagacgccaccttttaaagcgaactgtaaaacaagcttcctttacgtacaataaaaacaaaatcaaaggtggggctaatcttcttataaaagaagacatgataattgacagaataaatgaaaactctattacagaaaaaactgatctgaccatgtccactgcagcttgtccaccttcctatgaccgggtgacaaagccaattgtggaaaaacatgagcaagaaggcaaagatgaaaaagccaaagggaaataaatgaaaataaataaaaataattgggtgacaaattgtttacagcctgtgaaggtgatgtatttttatcaacaggactcctttaggaggtcaatgccaaactgactgtttttacacaaatctccttaaggtcagtgcctacaataagacagtgaccccttgtcagcaaactgtgactctgtgtaaaggggagatgaccttgacaggaggttactgttctcactaccagctgacactgctgaagataagatgcacaatggctagtcagactgtagggaccagtttcaaggggtgcaaacctgtgattttggggttgtttaacatgaaacactttagtgtagtaattgtatccactgtttgcatttcaactgccacatttgtcacatttttatggaatctgttagtggattcatctttttgttaatccatgtgtttattatatgtgactatttttgtaaacgaagtttctgttgagaaataggctaaggacctctataacaggtatgccacctggggggtatggcaaccacatggccctcccagctacacaaagtcgtggtttgcatgagggcatgctgcacttagagatcatgcatgagaaaaagtcacaagaaaaacaaattcttaaatttcaccatatttctgggaggggtaattgggtgataagtggaggtgctttgttgatcttgttttgcgaaatccagcccctagaccaagtagattatttgtgggtaggccagtaaatcttagcaggtgcaaacttcattcaaatgtttggagtcataaatgttatgtttctttttgttgtattaaaaaaaaaacctgaatagtgaatattgcccctcaccctccaccgccagaagactgaattgaccaaaattactctttataaatttctgctttttcctgcactttgtttagccatcttcggctctcagcaaggttgacactgtatatgttaatgaaatgctatttattatgtaaatagtcattttaccctgtggtgcacgtttgagcaaacaaataatgacctaagcacagtatttattgcatcaaatatgtaccacaagaaatgtagagtgcaagctttacacaggtaataaaatgtattctgtaccatttatagatagtttggatgctatcaatgcatgtttatattaccatgctgctgtatctggtttctctcactgctcagaatctcatttatgagaaaccatatgtcagtggtaaagtcaaggaaattgttcaacagatctcatttatttaagtcattaagcaatagtttgcagcactttaacagctttttggttatttttacattttaagtggataacatatggtatatagccagactgtacagacatgtttaaaaaaacacactgcttaacctattaaatatgtgtttagaattttataagcaaatataaatactgtaaaaagtcactttattttatttttcagcattatgtacataaatatgaagaggaaattatcttcaggttgatatcacaatcacttttcttactttctgtccatagtactttttcatgaaagaaatttgctaaataagacatgaaaacaagactgggtagttgtagatttctgctttttaaattacatttgctaattttagattatttcacaattttaaggagcaaaataggttcacgattcatatccaaattatgctttgcaattggaaaagggtttaaaattttatttatatttctggtagtacctgcactaactgaattgaaggtagtgcttatgttatttttgttctttttttctgacttcggtttatgttttcatttctttggagtaatgctgctctagattgttctaaatagaatgtgggcttcataatttttttttccacaaaaacagagtagtcaacttatatagtcaattacatcaggacattttgtgtttcttacagaagcaaaccataggctcctcttttccttaaaactacttagataaactgtattcgtgaactgcatgctggaaaatgctactattatgctaaataatgctaaccaacatttaaaatgtgcaaaactaataaagattacattttttattttattgtttgcccagtcactttttgttaacagaatattctaatgatatggagattttttacattacaaattgggggagaaggggagcgcgcgcgcacacacacacacacacacacacacacacacacacacacagaggcatacccacgttgacaacaaaacctagggtagatatgtcactggaggtagggggtaatgacctcccagaattacaagcagcaggtgtgttctctgttaggaggaagaactggtgtcagaggatagctagtgattctaggaggaagagaagtatggaagccagagtgatggtggatgaccccttgagctatgaaaagaaacccttaaatcatcatttaaaaatttagaattgccatgtgtgtaggatactgtgtttgctcctccagagccactctctctgcttctgcatcattctgtgtgtcccagaagggtgacttctacacattgcaaaaatgggctctcctacctttgagctcccaattggtttggccaatgagaagcaccagtgggaaagcaccagagagagaagattgacataggaatatttcttctccaattccttctttgctgggttggcactggactcattcctccccgaaaagtcatactccaatcagactgcccctcatacaactgaagctactttctctggggtcaggtaatcactcctccccttgctccttcaggtctgctgctgcattgagagtgcttttgtattccttgtagctttctcctaacattgctgacacttttgtaaatgtccccttcatgaaattcttctatatgcctcatttcagcatgccatctgtctcctgcctggctgacacaaggtgattcaacagctcatgaaagtcagcaggaagcaaagatgtgccttgcttcagcttggggtcttaatcttgctaacttttgcagataaagaaaaacagtaactgggggaaccacagtgaagtccagtgcagaattcacagatatcatggaaaggttactcgggtggtccagatagtaaaattaacagtctaaattaatctatctaaatttctgaggaacgagaagccttcccttgtcatcaggtgaagccagaagagggaatatagcctcaaccagaaaagggacagtaattaaaaggcttttcccatccttgtacaatggactgactttgcctcttcataacatcacaatcctaaagcaacacaacaattaattctgatatattagtagctgaaaaaaattcccatttccaactaaggtaggtcagaattataggataaaccctgcagactttttatactacccatccacgccattactcactgttacctttccaaatacaaagagaagaactggtaaaacataatcatataaatctccatattcattttgaaatatttggcatgatattttctgtgctaaaaagtaattattcttcaaagaatgatgaggtcatgtcagtaagacacaggaaccaactagaaggggcttcccactggccaaatctggggcaagttgagcatcaaaataaatgatagtaaaagattataattcattgaataagaatcagcaaatacatactgatgtaagtaaataaggaaaagtacaaatctgtttcttgcagttgaatgttaattaacaattgtagaagaaataacggagttagaaaaatcactatttggcaatcaccctaatgacaattgattcatacaagaatcatcaatgagtattaaaactcatgggtgaaagtttgatgaggaatagggtatttatagcatcttaaagtatctcttctctattaagtagaaaatttaaacagaagaaagtatactttggagaaatacagcagacaataccttcaaagatatcatcaattatgagaccaactgatactatgtgcctcctgataagatatactgaaagggccacattacttcttggtacacagtcaaaattttaaaaccagaatctaactacaaggaaaatcaaattgaggacactctataaaataagtggactgaactccttaaaaatgtcaatgtcatgaaagacaaagaaaggctaaagaattccatgaggtcaaagaactatgacaactaaacacaattctggatggaatatcaaattaaaaaataacagataaataatattattgggaaagttgaataaatttgaatatggactgtttattagttattagtattataatagtgttaattttcctaattttgttaagactagtgtgcctgttccatgaaaatagaaaatgttcttattctctgaaaatgcatgctaaagtatttaggggtgaatgcaacaatgtctgcagctcattcttgaatcagttcaaagaaaaatgagttacatttatatatatatgtatgtatgtaaacagacatagataaaagtatagatgtgtgtgtgtctttagaaaggggaggattttttttttttttttgctgtgtgttactgaagtgcctatgtctgcgtgttcacactatcatattttgtatgccctggactttataatttctaccttcaaaattagatctactgttggtaattaattcaatatatactggttttttaactactattctcatttcctagcagtaatcttcctgaaaagtcacagaaatgattacattccttgttcttcataataatcactgtttaattaaaataagaatattttagaaaagatctgcggcatagtggttaagaccccagtatttgatgctaaacagatctgatttggataacagaaggtggcactttgctgtttaagctggggaccagacactgtgggtataaatagtaattccaaacacagctccacagagcagcacccttatgacaaggttttcatatgtctatagttaagccagaaaattaagaataatgccataaatatttataaagctgaacatatccaagttaaagacctttatcctgaaattgtatcttttagattattttctaaagactaataccatttaatgtttaaatgttctttggaaatgatggtgagaatacgtgataatgggtcattggttttaatattttatttagccaagtggaaaattggcaacctggtgtcggtcctcccatttgtattttactggtgcatgaaatccaaaagtctagtaaccattgggacagacaactctactgcataagtttgtatgtttgtatatctgtatcacaaagcccagacactcgaactatataaacttgtcgcactaaagacagcaaatatgtctggtaattgcatattcttcatgtgtgcactggaatttcttattatataagaaaataaatgtgtttctaaaccaccatgaattgggtactgctgatagtactattcttcctggcacatggaaatatcccactgaggttgtcaatcaatattgatttaatcagtgtggcagcaaaggcactagaggaggaaaatactctagacaatcaagtatagatgggaaaattgcatcaccaagaaattcttaaaatcacaagtggataatttgcaatatcaattgattttactcaactgcttgagtcctttatcattccgttagaacactcctcatatttgcagataactcagcccctcacctcagcaacaagcaagaggacatcattataaacttcctcaatttctttcctatccagtgaaaaatatctaagtcccttttcccttcccttttccttcccttcccttcctttttctttccttccattctcttcctttttccttcctttttctttccttccattctcttcctttttccttcctttttcttactttacctccccctcctacctttccctttctcccttcctccctctctcccttccttcctctctccctctccttccttccttccttcaatccatacttttatatcttttcagagatcaatttttcccattcatttctacattctcagataccttgctccatgacttgttctacttctcttctatctttattctttccctcttgactgatcctttttgtctgcctttgcattttcaaaatcagtttttctaatcttaaaaaataactttgctcaaccctgatgcatctttattcactgtgtcattatctcattatttttaaaggttagtttctaaagccagggctctatactcactaccttcactcttggttaaaattaaaagaaatataggtcccagtgatatttatgggaaaatttgactgtgaataatcttgttgatataaacactttgggttttcaaaatgttatgctagctgttaactttcccagtaacattatgagggaagggctggaaaatacaaaaggtagacataggaaccgagaacaccacccctatggagccaagctatacatactctgtctctggttatcataaatacatctcctatattcaatgcttgcttagaaaggcatgatgtccacggagcaattcaattgttcactgtgatgggtttttttgttttctcctcatggaatgcaacttttatttatgagaatatggagaccagaaagtccctaaaataaatttgtaaaaaaaaaaatttaaggataaattcatcatgaaaaaagtattgttatagaaagtttaatttttcccctaagttgttatgaactgactacccctgtgttaattaaacttgccattatgcatgtgtatattttgttggaaaccattgagatacaagtcttatttttcttcttcaagctgtttgaaataaattgtgactcaaacaaattcaaataccagcccaatgctgaatcttattcttccagagcaccttctctctctccttcatggtctcaaacctggctcctacttttaccactctaaattagctaaatttgatctttattcaggcttcatcgtatctggcagatttttagaattcagtgatgatgatgatcatcacctcctccctctttaaattgcatcttactgtgtcttccataaaactagagtaccctaggcctcttagtgtatctttgattctttttcttttctttctttctttcttcttttttgtgttgttgttgttgttgagatgtagtctcactctgtcgccaggcagtggcacaacctcctctcactgcgacctccacctccctggttcaagcgattcccctgcctcagcctcctgagtagctgggactacaggttcacgccaccacacccagctaattttttgtattttttaatagaaacggggtttcaccattttggccaggatggtctcgatctcctgacctcgtgatccacccgccccgcctcccaaagtactgggattacaggcgttaagtcaccgcgcctggcctgtatctttgattctttgcctttactctctatcaatattttctctccttttagatttgtagtgcagcagcagcctttttgctgagttggtgctgcatctccacacgtctgttggacttttgtacttgcatattcagctatcaccttcaacttaatatgtccaaaactagtccctttatagtctatccctatcagccatcaacaaaactagccagaagtcaaccagctttccccatatctgttattgttcaagttatctttctaattcggcaaaagaaataagtacaattacaggatatattgaagaacaaatgagtaatgctatgtgaggatacagggaaaggttatataataggaaaacttttttttttttttctttgaaacagagtttccctctgtcacccaggctggagtgcagtggcgcaatctcgggtcactgcagcttccactccccgggttcaagcgattctcctgcctcagtctcccaagtagctgggattacaggcacccaccaccacacctggccaatttttgtgtttttggtggagacggggtttcaccatgttggccgggctggcctcgaactcctgacctcaagtaatccacccgccttggccccccaaagtgctgggattacaggcataagccaccacgccgagcctataatgggataacttctgatctgggttttgaagaataagcggggtagggcagccaggacagcaaaaatatcagaccaatggccaaaaccacaggctctagagtcagattgcctggatccaaatatcagctatactgatattacaaaagtttcttggcctctcattgcctcaatttcatcatctgtaaaaatggtaataataattcttatgaggactaaatgagttaacggaagtaaagctttcagatcaacagttccaggcatataattactacataagtctttgttttaatgatgacaattaaagacacatatgaaaatgagaaacacaaggacagttcagagcatttttaagagttcactgttgctaatgtgaaaaaggagcaatgacagtgactgagagacaagcaggactcagatgataaagggctttaaatgcagggtgggggccttggtgatgaagacccatttagaaattgtaaaagaagcaaaagtcggtgagagtagattttgacttcaagacaaaggaaacattcaatgtgaattttataattgttttgtctaattctaggaaaaatgacattggtaaaaaagcaataaatgttggtgaggtacagtgaaaaggaaaggcttatacactgttggtgggaaagtaaattagcacaatttatgtactatttatgtaccatttatgtttcctctttggaaaacagtatggagatttctcaaagaactaaaagagatctaacattctatctagcaatccccctactgggtatctacttaaaggaaaataagttattatatcaaaaagacacctgtatttgtaggtttatcacagcccagttcacaattgcaaagatatggaatctacataagtgtccatcaactgaagagtggataaagaaaatcaggggtgtccaaggtagacaatacagtcatgggttcttagtttctatttctgtttgggtcagtaaagccccttgctcatctcccttttctgcttatcactagggacagaaactaaaagtcatggcttcaggctgctaaagtctaaaacaaaacaaaacagaacaacaagaacaataaagttaggcgggacaagcttgaagactgaacagtagttatttatggcagaatactactcagccataaaaat

SEQ ID NO: 2 - DNA, 8612 bp, Homo sapiens
ttgctgatttgtattaggtaccatagagtgaggcgaggatgaagccgagaggatactgcagaggtctctggtgcatgtgtgtatgtgtgcgtttgtgtgtgtttgtgtgtctgtgtgttctgccccagtgagactgcagcccttgtaaatactttgacaccttttgcaagaaggaatctgaacaattgcaactgaaggcacattgttatcatctcgtctttgggtgatgctgttcctcactgcagatggataattttccttttaatcagaacagcataagaattatttctgagtggaggtgaggcttgtccaaatgtctttgctatcatggatttcctgactcctacctgtttgaggtttgggcaattatgaataaggctgctgtatacatccgtgtgcaggattttgtgtggacataagttttcaactcctttggttaaatcctaaggaatttcatatgcagaataaatggtaattaaaatgtgcaggatgacaagatggagcaaacagtgcttgtaccaccaggacctgacagcttcaacttcttcaccagagaatctcttgcggctattgaaagacgcattgcagaagaaaaggcaaagaatcccaaaccagacaaaaaagatgacgacgaaaatggcccaaagccaaatagtgacttggaagctggaaagaaccttccatttatttatggagacattcctccagagatggtgtcagagcccctggaggacctggacccctactatatcaataagaaaacttttatagtattgaataaagggaaggccatcttccggttcagtgccacctctgccctgtacattttaactcccttcaatcctcttaggaaaatagctattaagattttggtacattcattattcagcatgctaattatgtgcactattttgacaaactgtgtgtttatgacaatgagtaaccctcctgattggacaaagaatgtagaatacaccttcacaggaatatatacttttgaatcacttataaaaattattgcaaggggattctgtttagaagattttactttccttcgggatccatggaactggctcgatttcactgtcattacatttgcgtacgtcacagagtttgtggacctgggcaatgtctcggcattgagaacattcagagttctccgagcattgaagacgatttcagtcattccaggcctgaaaaccattgtgggagccctgatccagtctgtgaagaagctctcagatgtaatgatcctgactgtgttctgtctgagcgtatttgctctaattgggctgcagctgttcatgggcaacctgaggaataaatgtatacaatggcctcccaccaatgcttccttggaggaacatagtatagaaaagaatataactgtgaattataatggtacacttataaatgaaactgtctttgagtttgactggaagtcatatattcaagattcaagatatcattatttcctggagggttttttagatgcactactatgtggaaatagctctgatgcaggccaatgtccagagggatatatgtgtgtgaaagctggtagaaatcccaattatggctacacaagctttgataccttcagttgggcttttttgtccttgtttcgactaatgactcaggacttctgggaaaatctttatcaactgacattacgtgctgctgggaaaacgtacatgatattttttgtattggtcattttcttgggctcattctacctaataaatttgatcctggctgtggtggccatggcctacgaggaacagaatcaggccaccttggaagaagcagaacagaaagaggccgaatttcagcagatgattgaacagcttaaaaagcaacaggaggcagctcagcaggcagcaacggcaactgcctcagaacattccagagagcccagtgcagcaggcaggctctcagacagctcatctgaagcctctaagttgagttccaagagtgctaaggaaagaagaaatcggaggaagaaaagaaaacagaaagagcagtctggtggggaagagaaagatgaggatgaattccaaaaatctgaatctgaggacagcatcaggaggaaaggttttcgcttctccattgaagggaaccgattgacatatgaaaagaggtactcctccccacaccagtctttgttgagcatccgtggctccctattttcaccaaggcgaaatagcagaacaagccttttcagctttagagggcgagcaaaggatgtgggatctgagaacgacttcgcagatgatgagcacagcacctttgaggataacgagagccgtagagattccttgtttgtgccccgacgacacggagagagacgcaacagcaacctgagtcagaccagtaggtcatcccggatgctggcagtgtttccagcgaatgggaagatgcacagcactgtggattgcaatggtgtggtttccttggttggtggaccttcagttcctacatcgcctgttggacagcttctgccagaggtgataatagataagccagctactgatgacaatggaacaaccactgaaactgaaatgagaaagagaaggtcaagttctttccacgtttccatggactttctagaagatccttcccaaaggcaacgagcaatgagtatagccagcattctaacaaatacagtagaagaacttgaagaatccaggcagaaatgcccaccctgttggtataaattttccaacatattcttaatctgggactgttctccatattggttaaaagtgaaacatgttgtcaacctggttgtgatggacccatttgttgacctggccatcaccatctgtattgtcttaaatactcttttcatggccatggagcactatccaatgacggaccatttcaataatgtgcttacagtaggaaacttggttttcactgggatctttacagcagaaatgtttctgaaaattattgccatggatccttactattatttccaagaaggctggaatatctttgacggttttattgtgacgcttagcctggtagaacttggactcgccaatgtggaaggattatctgttctccgttcatttcgattgctgcgagttttcaagttggcaaaatcttggccaacgttaaatatgctaataaagatcatcggcaattccgtgggggctctgggaaatttaaccctcgtcttggccatcatcgtcttcatttttgccgtggtcggcatgcagctctttggtaaaagctacaaagattgtgtctgcaagatcgccagtgattgtcaactcccacgctggcacatgaatgacttcttccactccttcctgattgtgttccgcgtgctgtgtggggagtggatagagaccatgtgggactgtatggaggttgctggtcaagccatgtgccttactgtcttcatgatggtcatggtgattggaaacctagtggtcctgaatctctttctggccttgcttctgagctcatttagtgcagacaaccttgcagccactgatgatgataatgaaatgaataatctccaaattgctgtggataggatgcacaaaggagtagcttatgtgaaaagaaaaatatatgaatttattcaacagtccttcattaggaaacaaaagattttagatgaaattaaaccacttgatgatctaaacaacaagaaagacagttgtatgtccaatcatacagcagaaattgggaaagatcttgactatcttaaagatgtaaatggaactacaagtggtataggaactggcagcagtgttgaaaaatacattattgatgaaagtgattacatgtcattcataaacaaccccagtcttactgtgactgtaccaattgctgtaggagaatctgactttgaaaatttaaacacggaagactttagtagtgaatcggatctggaagaaagcaaagagaaactgaatgaaagcagtagctcatcagaaggtagcactgtggacatcggcgcacctgtagaagaacagcccgtagtggaacctgaagaaactcttgaaccagaagcttgtttcactgaaggctgtgtacaaagattcaagtgttgtcaaatcaatgtggaagaaggcagaggaaaacaatggtggaacctgagaaggacgtgtttccgaatagttgaacataactggtttgagaccttcattgttttcatgattctccttagtagtggtgctctggcatttgaagatatatatattgatcagcgaaagacgattaagacgatgttggaatatgctgacaaggttttcacttacattttcattctggaaatgcttctaaaatgggtggcatatggctatcaaacatatttcaccaatgcctggtgttggctggacttcttaattgttgatgtttcattggtcagtttaacagcaaatgccttgggttactcagaacttggagccatcaaatctctcaggacactaagagctctgagacctctaagagccttatctcgatttgaagggatgagggtggttgtgaatgcccttttaggagcaattccatccatcatgaatgtgcttctggtttgtcttatattctggctaattttcagcatcatgggcgtaaatttgtttgctggcaaattctaccactgtattaacaccacaactggtgacaggtttgacatcgaagacgtgaataatcatactgattgcctaaaactaatagaaagaaatgagactgctcgatggaaaaatgtgaaagtaaactttgataatgtaggatttgggtatctctctttgcttcaagttgccacattcaaaggatggatggatataatgtatgcagcagttgattccagaaatgtggaactccagcctaagtatgaagaaagtctgtacatgtatctttactttgttattttcatcatctttgggtccttcttcaccttgaacctgtttattggtgtcatcatagataatttcaaccagcagaaaaagaagtttggaggtcaagacatctttatgacagaagaacagaagaaatactataatgcaatgaaaaaattaggatcgaaaaaaccgcaaaagcctatacctcgaccaggaaacaaatttcaaggaatggtctttgacttcgtaaccagacaagtttttgacataagcatcatgattctcatctgtcttaacatggtcacaatgatggtggaaacagatgaccagagtgaatatgtgactaccattttgtcacgcatcaatctggtgttcattgtgctatttactggagagtgtgtactgaaactcatctctctacgccattattattttaccattggatggaatatttttgattttgtggttgtcattctctccattgtaggtatgtttcttgccgagctgatagaaaagtatttcgtgtcccctaccctgttccgagtgatccgtcttgctaggattggccgaatcctacgtctgatcaaaggagcaaaggggatccgcacgctgctctttgctttgatgatgtcccttcctgcgttgtttaacatcggcctcctactcttcctagtcatgttcatctacgccatctttgggatgtccaactttgcctatgttaagagggaagttgggatcgatgacatgttcaactttgagacctttggcaacagcatgatctgcctattccaaattacaacctctgctggctgggatggattgctagcacccattctcaacagtaagccacccgactgtgaccctaataaagttaaccctggaagctcagttaagggagactgtgggaacccatctgttggaattttcttttttgtcagttacatcatcatatccttcctggttgtggtgaacatgtacatcgcggtcatcctggagaacttcagtgttgctactgaagaaagtgcagagcctctgagtgaggatgactttgagatgttctatgaggtttgggagaagtttgatcccgatgcaactcagttcatggaatttgaaaaattatctcagtttgcagctgcgcttgaaccgcctctcaatctgccacaaccaaacaaactccagctcattgccatggatttgcccatggtgagtggtgaccggatccactgtcttgatatcttatttgcttttacaaagcgggttctaggagagagtggagagatggatgctctacgaatacagatggaagagcgattcatggcttccaatccttccaaggtctcctatcagccaatcactactactttaaaacgaaaacaagaggaagtatctgctgtcattattcagcgtgcttacagacgccaccttttaaagcgaactgtaaaacaagcttcctttacgtacaataaaaacaaaatcaaaggtggggctaatcttcttataaaagaagacatgataattgacagaataaatgaaaactctattacagaaaaaactgatctgaccatgtccactgcagcttgtccaccttcctatgaccgggtgacaaagccaattgtggaaaaacatgagcaagaaggcaaagatgaaaaagccaaagggaaataaatgaaaataaataaaaataattgggtgacaaattgtttacagcctgtgaaggtgatgtatttttatcaacaggactcctttaggaggtcaatgccaaactgactgtttttacacaaatctccttaaggtcagtgcctacaataagacagtgaccccttgtcagcaaactgtgactctgtgtaaaggggagatgaccttgacaggaggttactgttctcactaccagctgacactgctgaagataagatgcacaatggctagtcagactgtagggaccagtttcaaggggtgcaaacctgtgattttggggttgtttaacatgaaacactttagtgtagtaattgtatccactgtttgcatttcaactgccacatttgtcacatttttatggaatctgttagtggattcatctttttgttaatccatgtgtttattatatgtgactatttttgtaaacgaagtttctgttgagaaataggctaaggacctctataacaggtatgccacctggggggtatggcaaccacatggccctcccagctacacaaagtcgtggtttgcatgagggcatgctgcacttagagatcatgcatgagaaaaagtcacaagaaaaacaaattcttaaatttcaccatatttctgggaggggtaattgggtgataagtggaggtgctttgttgatcttgttttgcgaaatccagcccctagaccaagtagattatttgtgggtaggccagtaaatcttagcaggtgcaaacttcattcaaatgtttggagtcataaatgttatgtttctttttgttgtattaaaaaaaaaacctgaatagtgaatattgcccctcaccctccaccgccagaagactgaattgaccaaaattactctttataaatttctgctttttcctgcactttgtttagccatcttcggctctcagcaaggttgacactgtatatgttaatgaaatgctatttattatgtaaatagtcattttaccctgtggtgcacgtttgagcaaacaaataatgacctaagcacagtatttattgcatcaaatatgtaccacaagaaatgtagagtgcaagctttacacaggtaataaaatgtattctgtaccatttatagatagtttggatgctatcaatgcatgtttatattaccatgctgctgtatctggtttctctcactgctcagaatctcatttatgagaaaccatatgtcagtggtaaagtcaaggaaattgttcaacagatctcatttatttaagtcattaagcaatagtttgcagcactttaacagctttttggttatttttacattttaagtggataacatatggtatatagccagactgtacagacatgtttaaaaaaacacactgcttaacctattaaatatgtgtttagaattttataagcaaatataaatactgtaaaaagtcactttattttatttttcagcattatgtacataaatatgaagaggaaattatcttcaggttgatatcacaatcacttttcttactttctgtccatagtactttttcatgaaagaaatttgctaaataagacatgaaaacaagactgggtagttgtagatttctgctttttaaattacatttgctaattttagattatttcacaattttaaggagcaaaataggttcacgattcatatccaaattatgctttgcaattggaaaagggtttaaaattttatttatatttctggtagtacctgcactaactgaattgaaggtagtgcttatgttatttttgttctttttttctgacttcggtttatgttttcatttctttggagtaatgctgctctagattgttctaaatagaatgtgggcttcataatttttttttccacaaaaacagagtagtcaacttatatagtcaattacatcaggacattttgtgtttcttacagaagcaaaccataggctcctcttttccttaaaactacttagataaactgtattcgtgaactgcatgctggaaaatgctactattatgctaaataatgctaaccaacatttaaaatgtgcaaaactaataaagattacattttttatttta

SEQ ID NO: 3 - DNA, 176000 bp, Mus musculus
gcttttctaattcaagcaagcttagactggctgcccatgctcaatgggttaggattttaccagaaatacaaactataaggtaaagagaatgtataggggagtgtgctgggtaaccttgattgtcaccttgacaaggtctgtagtgtcaccaaggagacagctggctaggcatgccagtcagggattgggcaaattaaggtgagaagactcattctaaatgtggctgttttcatgggctggggtcggtgctgaagaaaaagaagacatttagcagagtaggagcatttataactctctgtgttctgaccttggacatcacatgacctaagcttatgttaccatgcatctttatcaggaaacactgtatcccttctgagtataaacagaaattaactcctcaagtaccatcttgccagttgctttgtcacagcaaaccaaaaaaacaaacaaacaaaaaaaaaaaccagagttattctggacactcctgtagaaagtggttttggtttggtttggtttggtttggttttttgtttttttccacagttaagcatcatgagatgtaagttagtctccagatggtcctccataaatatttttagagaaacaattgaactgctggtacctgacatctattctttcccatttctcttatgtacattgcagtcaagctgccagtggagagagaggcagccacgctgaggccatgagtcaacaaacaagaggataaaagctcagaacacagctcagcaggacagggatggctgaatatgtgtgcagctgagtttggcactaagcatcattaaaaccaaaccagaacagacaagaggatgaaagtcataggctgaaaatggtcaagaggaagaaaactgagctcaaaccactaggcatttgctggactggctctgaagtcctacctccagatgactacatcactgtggaaattccatattcccttcattaagctggtgaataccatattatatctgatgtggccaaactcgtactgccttgatccaataggagaatctttacattaaacattataaaaatggtttgtgaacaagtatttcagaagcatccatttgcatagaaaattactaaattaacatgttaataaataattttgtagacaatttaagtcactctccaaagaactcaactaaaccatagtaggtgcagctccccacacatgaatacattgtgaaccctgttcattccactattcattcactcagcaaatattcaatgatgttcagtaagtactgtcctaacagcagagacacaagagtgtgaaaatcagtttcagactgcaagagactcgtcgtttttcaaaaaaaaaaaaaaatgtaagacagaactttttaaaaatgatatgcatattccagatccttgccccctgtgtggttgattcccaggtcattaatgcttcaaaacagggagaagcctattgcataattcacatcagcaccatttctatcactcaatattcaaaatataactgaaggctttgaaaatgtaactcaactctaccccaatatgttctttacagttctggggaggatggagagggaggagatttctcattctatttactacagaacttggtttttttccaaaattatactactgaaaaaaaaaaaaagcaaatgtttagtgacattataatctgtctggagaaaaaaaaaatgactgtaaatccagccgatggtctagtaaaaaaaaaaaacaaaaaaaaaaaaaaaacaaaaagacaaaaaaacaaaaaaacaaaaaaaacaaaaaaaaaaaaacaaatgaaaacaagtatttactatactgcagtagcaaaactaccaggtgaatttgggggaaacctcacctacgttggctcagacacatttaacttcttttaatgtctatttccttactcgttaattaacaggagaaagtagatcaccgtgttctttcatgcccctgtatcgtctcatctcctcaccctggtcttaatgtggctcatagcagcaaactccctagctaagaaaagaaggctgcgattatttttaagtagtgcatggcgtcctctctatttctgtcacctccaaaactagatggttttgtccacaacccatgtaagaccatgattttacatataactaaatagtatgatgtcatcttgtgctcatatgaaatcatcacactcagaatcatggtaggagactggatgtactgtttgtaggttttaagactgtagctcatgttacatacacttgagataattgattgttaattaggcagtttaatattttttaatctgctgcttaaaatattccccttggtatcaagaagtgaatctaagaatgaccatctttttaaaataaaataaaataaaacaaaataaaataaaatagaataaaacaatttctatagagattgttttgaaagtctaaaagaatggttcactatatgcaaaatctaaggagaaagctcagaacctcttttctcagtacagacagtacaattatcacatctgatatttatctgcaaaccacaaagatgtgtacctgctcttattacttggatgaacatcaggagttaaaatgcattaaaacagtttaacccagcacagtctcaatttgatggagaagagtaattttactatcatcttgtttattaaaatgtgtctaaagtattgagcacttcacagatttttttttttttggttattactctgcaaagcaacctacacaaccaactctcattgcatactgccacatcccctctactcaccacaatgagttaaaggcagaccaaagctctcagcagcatcctttgcatttattacaaggcttcaccagccccttccttcactccagatgtgatggttcaggagttgacagcaggagaagtcgtcccctcgggtttactgcacactccaagagaggtcccctgcacttgccaggagatttagctttcatgcttctggtcattcttcctacccacaaaatgagacctatttctgggctattcataactctccttccaaaacgtttcaaaaacgaaaagcaagacctggttcatgatttccatgcaagatctcagcctgcccgcctgcttgctgctgccaatacttcttactcttgctggtgatgacatcgtgcaagctccccagcactgatgcttcattatgtaagtctgtctaggtcaagtgtaggagactcactaccggcctgtggaaactcatggaactgtttcttcagattaacacttcaggggctatcgaggctgcaggaagctgagctttaactacatacatctttcgggggtaaatatttttttgcatgattttatgttttgggttttgtttttttttaatcctttggcgggctcctgtcagccaggctgataggtgcaggtaggcaattctaagaggttccaattctgtcagcatgcttgaataagcatggaaagtctcgcactggttctagaattaagacacgattaaaaacatcctaaattgaactttgctaatgaagccttttttatggtgttgatttgatgtttaaaccaagtaggattcgtttgatctgaggcgttgcaggagagcattgttagatgttgctgtgagcgtgaaaagatttactgcagttcgctgccgcgctgcccttgtctctaactgagaattcgcttgtcttgtaaatgagctctgagtctgctgcactgtgtcttccgccgcgcctgtttgtgacaagaacggagcttgaataacctggtagttaggggacttctgctgataataaatcctgcctacttagtctcgggatgcatactgcagcagctccagtgtcatttgatactagcgctgaatgaggttgggttaactgcattgggtcaggaggggctgtgcttaggagatctggcgggctgagccctggtttgatgtgacccttaactcatctaagagtaaaggtaaaaccagaggagaactggttctatcagactatctcgctttgtgtcctgctgcaagaactagttaaaacggcatactcagaacggcacactgcagaacttgcagggcaagtagcaaggtgaggttgccgcagcggtgtgagattggcaggaaattttcacacaattaaaaccgagatgatgacacaaccgagtgcacctcatttaaaatgacagagggatttaaaaagttggagatcaatgcagcatgtttgaaagtttggcttcctttgtgtccttggcaagcaagggtctgtgattgggacttgaccagagttaaaagtttcctgtcatttgcttgggtgtcttcaaatgagctctggtgtaagcagtaaggcagactaactacaggattactgtggatagaacattgaaaactgccttatattcttctcactattgaattaaaagaatgaaaaggagtgttaccgaaatcaatttgcctgggtgccattttcatactgctaagcacaatgaacaggggcgtgttgatcatttgtgattgactaaatttgtcctgtatttaattgattgaagatgtacacattttcccaaatcatttgaagagacagttacggctccctaaaggcctgattttatattactgatgtcaatagcaacgatccccgtagatacagctcggcaggcccaatagatcaaggtcactcagtctagcagaaataaaatgttaaaaataaagaatgcatacagaataatatttatattatttgtttggatgtcttccaatttagggtattttatatataatatttttatataatacttattatatttagggtatcactcttctcctcaaataacatatgattattccttaatgttgtctctataggctatcaaaaacctacagatttcttcctttttagactttttgaaatttgaattatgtctaaattaccacttatatgattatagtcctttgtgtgaattaacattaatcactcttaaagtgagattacatgaagggtgagattcaagtttactcttagaccagcatttgccatttccccatcaaatgttaggcagtgtttctcagtggtctgagaaagctagctactagctatgtcagcatctgaatggaacatttggaaatgcccgtctttgggcctcagggcagacacacttagaacttccctttgtaggttctagaaatgcaagttcttacaacctccaggcagtagtgaggtgtgtgaagatccagtacatgggacagtaacttggtcagatatgaaaatggttttcatacaatatctgaataggtgttacataattaaattctctgtttcttcttgcctggcctaactatggctagctgtggactgatgtttactgtgcagttatgtaccatatctgaagtgcaaggggttcccagcaatattggtttttcagcagttccatgtggaatactagctctttgaagctaaatggcacgatgtaaatacactagaggacctacctctcttatatgctcagagcgactttgcacatatcactggcccctttggtgctcagtttctctctgtaaagtaagtgattgttctaacacaagattgcggctgggcctaattgggtgtcttagtcaggctttgtgttcctgcacaaaacatgatcaagaagcaagttagggaggaaagggtttattgagctaacacgtccacattgctgttcatcaccaaaggaagctggaacaggaactcacacaggacaggaacttagaggcaggagctgatgcagaggccatggaggagtgctccttactggattgctttgtgtggcttgctcagcttgctttcttatagaacccaggactaccagtccaggcatggcaccacccacattgagaaatgccttacggctagatctcatggaggcatttcctcaagggacgcttctttctctgtgataactccagctgtgtcaagttgacatacaaaaccagctagtatttttggggtttggggtcaggaattcttaggggtctctcttgtgcatagcagaattctgaccactatcactaacctgttgaactgatgtgctggtagagactaacaaatgtccccccaaggcagaactgttcccacacagcaatttaagtacatccaatttagattatctttcttatgaacaattacattatagtaaacaagacaacaaatgtgttgcttctcctactggtaagttaaattacaatagaaataaatatatggccacgtatgtaatatagtaaatttagaccccatcatattcatgaaagtgcatgtgtaattcagttaagtacccacagactgtggaaagccgaactctttctgcagcttcccagggacctagctcttcaccatcctgtttgtcctgaagtctccagatggcccagacaccctccactactagcctataccaaatatttagcaaagtgaaagacttttagattagattgaatccacttaactgaagatagggatttatattctcattttttttttctgcacctcttatccctcccctctttgccatccctgcaacatccaggagtgccccagtttcctcgtgtgacatgtacaatagtctgtctttccgtagctttttatccagatgtagacacacaaactcattaatgaacacaggcaatcaaggaccccagtgtaggactatgcacccagaaggaaatagatggaatatattatgtcatagagctggaaagagtgttatattcacagtcgtctttgcatccaagttatactaactctcatggcctttcaaattatacgtagtctatgttagagcttcagaaagtcaagtaatctcttcccaggaattattacctcaaaaaacttagcaacacagtccagatattttctagcgtgtatatgtatggtagaaatatacaaactttacaaaaacacaaatgtatacatgcatgcatacatatacataagcacacctactcataaacacatacatgcacatatacacaagcacacaaacacacagacaagcacacacacaaatacatacatacataaacacacacacacacactttttctacttctaagagcttttttgatatcctgttctacaagtacaagctgagatctgagtgaactcagaaatctggtctaagatgtatgtaactctatttctattaggcaaaattattacctgataattgcaatagtttatccacatttctaagtaaattcacacattatatgttctgagacccacagaagtttaaaaagataggttcttttgatgctatcacttttaagaaaaaaataataaagttgagatcacaaggtaccaaatctatgtctctctctctcttctcttctctcctacagagcagaacacagcagtatgtacactctgacttaaagtaaaatccccacatgatccagtaatcctaggaatacagctaaagaaacagaatttgatacttcagggtggtttttgtgtggccgcttccgtgtttttcacagtagccacagtatggttccacttaggaattcaccaatgggaacttagcaggagcaagggcctgaggctcactcacattgcttctgtgtggctggggctgggattctgatcttctctaatacagtgacactatactgtttcgtgaggcttgttttgttttgttttgttttgctttgctttgctttgctttgctttgctttgctttgctttgctttgctttgctttgctttgctttgctttgcttttatatcaacaagtaggaacaaaagaaataagacatgggaaaagccatgcaaattctgttgaaactgtcctgtgtgggaacatatgagcagaacaggtgtcaattttccatatgacatttcccaaaaatagtatcatggtcttgtaatgttggaaaagaagaaagtagtaataacagtgaagggggccctggtttccagcccccatagtctagtgagattgttagaagtagatttgtttgttttgggttttttgttgttgttgttgtttgttttttgttttttgtttttattttttattaggtatttagctcatttacatttccaatgctataccaaaagtcccccatacccacccacccccactcccctacccacccactctccctttttggccctggcgttcccctgtactggggcatataaaatttgcgtgtccaatgggcctctctttccagtgatggcctatctaggccatcttttgatacatatgcagctagagtcaagagctccggggtactggttagttcataatgttgttccacctatagggttgcagttccctttagctccttgggtaatttctccagctcctccattgggggccctgtgatccatccaatagctgactgtgagcatccacttatgtgtttgctaggccccggcatagtctcacaagagacagctacctctgggtcctttcgataaaatcttgctagtgtatgcaatggtgtcagcgtttggatgctgattatggggtggatccctggatatggcagtctctacatggtccatcctttcatctcagctccaaactttgtctttgtaactccttccaagggtgttttgttcccacttctaaggaggggcatagtgtccacacttcagtcttcattcttcttgagtttcatgtgtttaggaaattgtatcttgtatcttgggtatactaggttttgggctaatatccacttatcagtgagtacatattgtgtgagttcctttgtgaatgtgttacctcactcaggatgatgccctccaggtccatccatttggctaggaatttcataaattcattctttttaatagctgagtaacactccattgtgtagatgtaccacattttctgtatccattcctctgttgaggggcatctgggttctttccagcttctggctattataaatagggctgctatgaacatagtggagcatgtgtccttcttaccagttggggcatcttctggatatatgcccaggagaggtattgctggatcctccggtagtactatgtccagttttctgaggaaccgccagactgatttccagagtggttgtacaagcctgcaatcccaccaacaatggaggagtgttcctctttctccacatccacgccagcatctgctgtcacctgaatttttgatcttagccattctgactggtgtgaggtggaatctcagggttgttttgatttgcatttccctgatgattaaggatgttgaacattttttcaggtgcttctctgccattcggtattcctcaggtgagaattctttgttcagttctgagccccattttttaatggggttatttgattttctgaagtccaccttcttgagttctttatatatgttggatattagtcccctatctgatttaggataggtaaagatcctttcccaatctgttggtggtctttttgtcttattgacggtgtcttttgccttgcagaaactttggagtttcattaggtcccatttgtcaattctcgatcttacagcacaagccattgctgttctgttcaggaatttttcccctgtgcccatatcttcaaggcttttccccactttctcctctataagtttcagtgtctctggttttaagtgaagttccttgatccacttagatttgaccttagtacagggagataagtatggatcaattcgcattcttctacatgataacaaccagttgtgccagcaccaattgttgatgatgctgtctttcttccactggatggttttagctcccttgtcgaagatcaagtgaccataggtgtgtgggttcatttctgagtcttcaattctattccattggtctacttgtctgtctctataccagtaccatgcagtttttatcacaattgctctgtagtaaagctttaggtcaggcatggtgattccaccagagtttcttttatccttgagaagagtttttgctatcctgggttttttgttattccagatgaatttgcaaattgctacttctaattcattgaagaattgagttggaattttgatggggattgcattgaatctgtaaattgcttttggcaagatagccatttttacaatgttgatcctgccaatccatgaacatgtgagatccttccatcttctgagatcttctttaatttctttcttcagagacttgaagtttttatcatacagttctttcacttccttagttagagtcacgccgagatattttatattatttgtgactattgagaagggtgttgtttccctaatttctttctcagcctgattattttttgtatagagaaaggccattgacttctttgagtttattttatatccagctacttcaccgaagctgtttatcaggtttaggagttctctggtggaatttttggggtcacttatatatactatcatatcatctgcaaaaagtgatattttgacttcctcttttctaatttgtatcccttgatctccttttgttgtcgaattgctctggctaatacttcaagtactatgttgaaaaggtagggagaaagtgggcagccttgtctagtccctgattttagtgggattgcttccagcttctctccatttactttgatgttggctactggtttgctgtagattgcttttatcatgtttaggtatgggccttgaattcctgatctttccagaacttttatcatgaatgggtgttggatcttgtcaaatgctttttctgcatctaacgagatgatcatgtggtttttgtctttgagtttatttatataatggattacattgatagattttcgtatattaaaccatccctgcatccctggaataaaacctacttggtcaggatggatgattgctttaatgtgttcttggattcggttagcgagaattttattgaggatttttgcatcgatattcataagagaaattggtctgaagttctctatctttgttggatctttctgtggtttaggtatcagagtaatagtggcttcataaaatgagttgggtagagtacattctacttctatcttgtgaaaaagtttgtgcagaactggaattagatcttctttgaaggtctgatagaactctgcactaaacccgtctggtcctgggctttttttggctgggagactatttataactgcttctatttctttaggggatatgggactgtttagaaggtcaacttgatcctgattcaactttggtacctggtatctgtccagaaatttgtccatttcgtccaggttttccagttttgttgagtatagccttttgtagaaggatctgatggtgttttggatttcttcatgatctgttgttatgtctcccttttcatttctgattttgttaattaggattttgtccctgtgccctctagtgagtctagctaagggtttatctatcttgttgattttctcaaagaaccaactcctcctttggttaattctttgaatagttcttcttgtttccacttggttgatttcacccctgagtttgattatttcctgccgtctactcctcttgggtgaatttgcttccttttttttctagagcttttagatgtgttgtcaagctgatagtatgtgctctctcccgtttcttcttggaggcactcagagctatgagtttccctcttagaaatgctttcattgtgtcccaaaggtttgggtacgttgtggcttcattttcattaaactctaaaaagtctttaatttctttctttattccttccttgaccaaggtatcattgagaagagtgttgttcagtttccatgtgaatgttggttttctattatttattttgttattgaaaatcagccttagtgcatggtgatctgataggatacatgggacaatttcaatatttttgaatctgttgaggcctgttttgtgacctattatgtggtcaattttggagaaggtaccatgaggtgctgagaagaaggtatatccttttgttttaggataaaatgttctgtagatatctgtcagatccatttgtttcatcacttctgttagtttcagtgtgtccctgtttagtttctgtttccatgatctgtccattggtgaaagtggtgtgttgaagtctcccactattattgtgtgaggtgcaatgtgtgctttgagctttactaaagtttctttaatgaatgtggctgcccttgtatttggagcatagatattcagtattgagagttcctcttggaggattttacctttgatgagaacgaagtgcctttccttgtcttttttgatgactttgggttggaagtcaatcttatcagatattaggatggctactccagcttgtttcttcataccatttgcttggaaaattgttttccagcctttcattctgaggtagtgtctatctttttctctgagatgtgtttcctgtaagcagcaaaatgttgggtcttgtttgtgtagccagtttgttagtctatgtctttttattagggagttgagaccattgatgttaagagatattaaggaaaagtaattattgcttcctgttatttttgttgttaaagttggcattctgttcttgtggctgtcttcttttaggtttgttgagggattaccttcctgttttttctagggcgttgttcccattcttgtattggtttttttctgttattatcctttgaagggctggattcatggagagataatgtgtgaatttggttttgtcgtggaatactttagtttctccatctatggtaattgagagtttggctgggtatagtagcctgggctggaatttgtgttctcttagtgtctgtataacatctgtccaggctcttctggctttcatagtctctggtgaaaaatctggtgtaattctgataggcttgcctttatatgttacttgacctttttcccttactgcttttagtattctatctttatttagtgcatttgttgttctgattattatgtgtcgggaggaatttcttttctggtccagtctatttggagttctgtaggcttcttgtatgttcataggcatctctttctttagatttgggaagttttcttcaataattttgttgaagatgtttgttggtcctttgagttgaaaatcttcattctcatccattcctattatccccgtaggtttggtcttctcattgtgtcctcgatttcctggatattttgagttaggatctttttgcattttccattttctttgattgttgtgccgatgttctctatggaatcttctgcacctgagattctctcttccatctcttgtattctgttgctgatgctcaaatctatggttccagatttctttcctagggtttctatctccagtgttgcctcactttgagttttctttattgtgtctacttccctttttaggtctagtatggttttgttcatttccatcacctgtttggatgttttttcctctttttctgtaaggacttctacctgtttgattgtgttttcctgtttttctttaaggacttgtaactttttagcagtgttctcctgtatttctttaagtgatttattaaagtccttcttgatgtcctctaccatcatcatgagatatgcttttaaatctaggtctaggttttcgggtgtgttggggtgtcctggactggacgaagtgggagtgctgggttctgatgatggtgagtggtcttggttcctgttagaaagattcctacgtttaccttttgccatctggtaatctctggagttagtagttagagttgactctgtttagagattgttcttctggtgattctgttaccgtctatcagcagacctgggagacagattctctcctctgagtttcagtgctcagagcactctctgctggcaagctctcttacagggaaggtgcgcagatatcttgtttttggacctcctcctggccgaaaaagaaggcccaaaacagggcctttctccgaagctgtgttgctttggcagttcccagaagctgtcagcttctgtggtgcagactctcacctgtgcagactaaattcctaagttccagggagtcccggaaccaagatggcgaccgctgctcctgaggctgaggccgcctcccaagccaagcggacacctgtcctctggtccggacggtggccggctgtctgtggcccgccaagggtgctgcctcagcggctctgtgcttccgcctatcccagaagctgtctggttctctggcgcaccctctcacctgttcggactaatttcctaagttccacggagtcctggaaccaggatggcgaccgctgctgctgaggctgaggccgcctcccaagccaggcggacacctgtcctctggtccggacggtggccggctgtctgcagcccgccaagggtgctgcctcagtggctctgtgcttccgcctatcccagaagctgtccggttctctggcgcaccctctcacctgttcagactaatttcctaagttctgctgagtcctggaactgttttttgttttttgagacagggtttctctgtgtagccctggctgtcctggaactcactttgtataccaggctggcctcgaactcagaaatctgcctccctctgcctccccagtgctgggatcaaaggtgtgcgccaccacgtccggctttagaagtagatttgtattgatccgtacaatgaggacagaaaaggtattcgtttgtccttccaacttactaatcattgttctcctagcagtcaaccctctctcacagatataacttctcaactgtgattgaagaacaatttagccaatcagaaggatgctactattatgtcactgccctgtaaggaaatagaaatctccctcttactgtaagaaaggaataatacatttctatgttgaaagacatctgggttatttcctgcttctggctattataaataaggctgctgtgaactcataggtggatattagcccaaaagctcggaatacccaagatacaattcacagatcacatgaatctcaagatgaaggaagaccacggtgtggatacttcgatccttcttagaagggggatcaaaatacccatgggaagagatacagagagaaagtgggaagcagagactgaaggaaatggcctccagtgtctgtcctacctgaggatccgtactatatacaattaccaaacccagacactattgtggatgccaacaagtacttgctgagaggagcctgatacagctgtctcctgagaggctctcccagtgcctgacaaatacagaagtggaggttcacagccatgcattggactgagcacagggtccccaatagaggagctagagaaaggacccaaggagctgactaggtttgcagccccataggaggaacaacaataagaaccaactagtacccccagaactcccagggactaaaccaccaaccaaagagtacacacggagggactcaatgtagtagaggatggccttgtgggacatcaatgagaggagaggcccttagccttgtgaagactcgatgtcccagtgtatgggaatgccaggacagggaagtaggagtggatgtgttagtaagcaggggggagggggtgagacaggatagctttcagaggggaaaggaagaaaggggataaaatttgaaatgtaagtaaagaaaatatctaatttttttaaaagaaaggaacaatgcagtaagtccttgctgttgtcttctcagcatggttttcccgatttccatgtgagcctggctccagttttctgtctttgtcagatgctctaggcccatgggatctggacctcaccactcctgccgcgctctagccgtgtgcttggatctgaccctctttctgtgtatacataaccatcacctggccctcccaaaagcctcaggtaaattgacaagcaaaatcaaggcgttgcctagatgtgccctcccagaaaacaaaactgtgggaaggcaaggttactactgctggagtattcaacagcaccacacctttgcagggaagctgattggaatctgccattgtgtaaaagcagatgtttcctcaaaacgtactttagagaaaattttgtatagtggaaaggtgcttttaggttaataacaaggaagtaaatgaggtcatttaaaccaaacaagttatgtagctatatatagcgcatgatatcattgctggaaaactgaatttcatgtacttaaacacatgcataaagtttcagaaaaggaattgtttacgtctactacctgtgtagaatctgcttaggcaaagaaaacgtggattgctgttgctctctcttttattaatttattttttctcctcatatattatatccagttcacagcttaccctgtctcctctcccctcactcctcctgaacctcccctttgcctcctcccagttcacccattcctcctccatttcccatcggaaaagggcagtcttcacagggatagcaaccaaacatgacatatcaaattgcaacaaagctaggccccttcccttgtatgaaggctggacaaggtgcctcagtggaaaagaggagggtcccaaaagcaggccaaaagagacagagacaccccttgcttccactgttacaagtcccacagaagactaagctacaaaaccataatatatatgcagagggcatcggtcagtccatgtaggctcactggctattgattcagtgtctgtgagcccctattaatccaggttagttgattctgtgggcttttctgtggcatccttgacccagctagctcctacaactccgccctccttccaagaattcctctagctccacttaatgttaggctgtgggtctctgcatctgtttgcatcagttactagatgaaaccactctcatgatgatggtgctagactcctgtctacaagtacagcagaacctaactaggaatcatttcattgacttatttttttcaatagtgtttggttctatctgaggtgtctgggatatccagcctctctctgggtcctgaccttccagtcagtatcagccctgggctctctctctatgggtttcaagctgaaccagccattggttggccactcccccaatttttgtatcaccacagtacatcttgtaggcaggaaaaattataagttgaatgtgctgaggttgagttggtatcctaatccctccactggatatctagttataggagatggctagttaaggttctgtgtcctcactttctagggatcctagctaggtcacccttgtagattgctgggagcttccattgtgttaggtttctgcatcactgccaaaatgtccttctcctctttccagttctctctctctctctctctctctctctctctctctctctctctctctctctctctctctctccctctctctctcgcttgctccatgtcctcccccttccccacatgattcttcttgtcctcctccctacccaacctagtctacccacaatatctattctactttatcttccaagggaaattcatgtgccccccacacactgagccttccttgttgcttagcctctctgagtctgattctttactttacagagaatatactcttataactgaatgtgtaccgtgtttttctctctgggtctcactatggatgacttttttctagatctgttcatttcctgcaaatttcatgataaagctggtataaacatagttgagcaactgtccttgtggactgttctgtgggtatatgctcaggattggtatagttgggtcttaaggagctttaagacagagtttctctgtctttcctggacatatctctatagaccagtctggcctcactcagagatctgcctgcctctgcctctgagtgctgggattaaaggtgtgcaccaccacaactagctgtaccccatttttaaattggattgtttgttgatgtctagattcttgagggttttttgtttgtttgtttgcttgcttgcttgcttgcttgattttacatattttagaaattagctgtctgtcaggtgtggagttagtgtatatcttttcccattctgtaccttgaatattttgtccttttgatggtgtcctttgccttacagaagcttttcagtgtcatgaggaaacatttattaaatgtccatcttaatgcctgcactattgatgttctcttcaggaagttgtcttctgtgccaatgcattcaaggctattcctttcttttctatcaggtgcaatgttttgatgttggtgtctctggttcatgtggccttgagttttgtgcagggtaatatacatggatctatttgcagtcttctacttgccaacatccagttaaaccagcaccatttgttgatgatgctttatttctccattgtataattatgtcttctttaataaaaaatcaggtgtccacaggtgtgcggatttacatctgggtctttgattcgattgcactgatcaagttgtctgtatttatgcctataccatgtgtttttatgatgatagctctgtcaaagagcttagaatcaggggtgtggtagttttaggaagttctttttttgtacaggattgttttagctatccttggttttttggttttccatttgaagttgagaattgttctttccaggtctgtaaagaaatttttttagaattttgatggggtttgcattgagtctgtagattgcttttttttactatgttaatctcacaggtccatgagcataagagaacttttaatcttctgacatcttcaatttctttcttcaaagacctaaagcttttatcatataagcttttcagtttcttagttacagttgccccaatatattttatattatctttatctaccatgaagtgtgttgcttccttgatttcttttttctcaacccatttgatgtttataaggatactgaattatttatttatttatttattatttattttagttaatcttgtatccagctgctttgctgaaggtatttatcacctgtatgagtttcctggaaaaattttatgggctgcttgtatatgctactatatcatctgaaaataataatacattgacttagtcctttccaaattgtattcctcttgatctcctttggttgtcttattactctagctagaatgtcaagtactatggacagtcttgtcttgtccctgatttttgtaaaattgcattgagtttctctctacttaacatgatgttggctatccacctactgtatattgtctttgctatgtttaggtatgtcccttatatccttgatctctctaagtcttgtatcatgaaggagtgttgtgttttgttaaaggcttttgtagtatctaatgagatgatcacgtcgggtattttttcactgtttgtatggtgaattacattgacagattttcatatgtagagccatccctgaatctctgtgatgtgtcctatgtggtcatgttgaacacatcttttatgtatattggatttagtttgtagatattttcttgagtatttttataccaatgttcatgggcaaaaattggtctgtaattctctttccttgttgagtctttttgcagattgggtatcatggtgactgtggcctcatgaaatgaatttggtgatgttccttctatttctattttgtggaataatttaaggattattgatattagctcttgtttgagggtttcctttttgtgaggtaggggagttgggagccttttcaaatgactgcttcctgtgattccttccttataggtcataggtctattttaattgtttatctgatcttgataagtggtatctattgagaaagttgtccatttcttttaggttttctaattttgtggagtaagtttttgaagtgcgacctaatgattctttgtatttcctcagtatctgttatcatgccccccttttcttttctgattttgttaagatattctctctctctctctctctctctctctctctctctctctctctctctgccttttagttggtttggataatggcttgtctgtcttgttgattttgtcttgttgattttctcaaagaactaaccctttgtttcattaattctttgtattgctctctttgtgtctattttactgatttcatccccgagtttatttcgtgccatctactcctcttgggtgtatttgcttattttattctagagcttttaggggtgctgttaagttgctagtattaaatctctctaatttctatatgaaggttcttagtgttatgaactttccgcttagcactgctttcattgtgtgccataggtttgtgtatgttgtgcattcattttcattgagttctagaaagtctttaatatcttcctttatttctgtttgacccaggggtcattcagtagagagttgttcagtttacataagtttttaagctttttgttctttctgttgttgataaaattcatctttaatctatgatggtctgatgagatgggggagttgttccagttttcttggatctgtagagacttgctttgtaacagagtctgtggtcaattttgaaaaagaagtttcatggggttctgagaagaatgtatattgtttttatttgggtgaaatgttctgtagataactgttaagtccacgttaagtctgttagtctgttaactccattatttctctgttaagtttttgtctgaatgacctgatgtctcccactgtaaatacatatttgggggggggcttcaacacagggtttctttgtatagccctggctgtcctggaactcactttgtagaccaggctggcctcgaactcagaaatctgcctgcctctgcctcccaagtgctgggattaaaggcgtgcgccaccacgcccgacttaatacatgtgttttgatgtgtggttttacaaatgtgggtgtccttgctttgaggggcatagatgtttagaattgagacatcatcttggtggggttttcctgtggtaaatatgaagtgtcctctgtctacttgattaatttttgttttgaagtcgatttgtcttatattacaacagatacaacagcttgtttcttgggtacatttgcttggaaaatctttttccaaaccctcaactcttaggtaatatctagctttgatgatgaggtgtgcttcttatatgtaacaaacggataaatcctgctttggtattcattctgttagcctgtgccttttgaggaattgagtccactgatattgagagatactaatgattaataagtgttaattcttattattttgttgttgtttatggtagtgctagtgtgtgtgtgtgtgtgtgtgtgtgtgtgtgtgtttccctctaatttttgtatgagcttatttatttcttcatgggtgtagttaacctcctagggttgttgatttccatttgtacctcgatatgcctggatttatgagtagattttgtttaaatttgactttgtcatgcagtatcttgtcttacccatctatgaggatgaacagttttgctggcgggctggagagatggctcagtgattaagagcaccgagatcctaagttcaattcccagcaaccatatggtgcctcacaaacatctgtaatgtgatctgatgccttcttctggtgaatctgaagagaccagtggtatactcatataaaaataaatctttttattttaagttttgcttgttagacgagtctaggatggtatctatggtctctcagagcctgtaagacatatgtccaggctattctggcttttagggtctctgttaagaaattaaatataattctaataattctaccttttcatgttatttggccttttttctcttgcagcttttaatatttttctttgttctgcatgttcagtgttttgattattagttgaccagggactttcttttccaattcaatccatttgtgtcttaagagatttttctgcctttagaaacatgtccttcttaaggttaggaaatttttcctctatggttttgttaaaaatattaactgagctctgtgggtgataaaacacagaaaggatgtctacagagtgtgccttggggatccaaaccaagggcataggaggtttctgagtgcagatgggcctcttactcattctcattagcctggcctgcacctgtgctctggagagtcacctgcgtagaggcaagtgcaagaagtgggagcaggcagtagggtggtggtgtcagtggcttgggtgtttgggctccaaacctagttatcaggagggttcagttatctggtggggctcttcccttttctgactggtatggcctgcacctgtgcagtaaataggaaggctaggttttacttaaagagccagcatggtgatctaattttcaaactgttacttcaagagtagattaggagatagcttctctggattggagtgtggagtgcccagaaaatgatgagaagggacaaattgtttagtcacatgctctgggtacagaaaaataggtagccttataaacgttaggtcacatgggtcatgaaatcagaagggaggtttatttaggaggagaaaggagaccaaaaagaagaggttggagaagggtagaggagtaaggggtaaacaaataagaacaatgatttgttatatacatatatagacattatatatatgtatatgtaatgacatatatgtatatatttatgcatatatggataaatatatataatgtcataataaaaacattattttgcatgcaaaattaaaatttaattaaaaataaaagctcttatgagaggtgtgaaagtattagctaatgttgtgggttgtccaccagagaagagtgcatggacatgggtttaagacaatagaaagtctttatcagctgggtagagacaacactgggtattcatgatcctgtataatcctgaacctttctcagagtgaaaccacctccggaattgtgttagtaagaacagttagccaaagcagaactacagaagccaaaaatccaaaggtggtgcatttagagatggttctagaactatgaactttgatggatcagatctttgtctttgttgtgtactgtctatgtgctgagcttttagggtctaaatgggtagttcacaatctgtgggtcatgaacccttggtggggacaaatgacccttgcacagcgattgcctaagactatcctgcatattagatatttatagtacaatccataacggtagaaaaattacagttatgatgtagaaacagaaataattttatggttggctgtccctacaacttgaggtgatatgaaaagattgcaggagcattagggaatggtacttgcgtcataacatcagttatgttaagttctcaagttcctgttatagcggcactctacagcaacacttttaaacagtgtctactggaatcacatgggcagctcgtcaaaacgtcctttctgatctggcaggttgtgggacaaaggaaatggtccaaaattttaacaagcccctcaaagatggagatgctgttgttccactgccacactcggacgagaagcaaggctttaaagcttacaaagttttatgttctcatgtgatccgtgtcttcacaaatatccagcagagccagaaagcacttgccttttcaaaaaatgtgctgagaaaaagaaaaacatgacattgaatattatatttgaaacatgaagctttgtcagaagcctcattgtcaacctctcacactcagaaattctgctcttttcatttttttatgttcaacaaatgtcgacttgtggatactaaggtactgacagactgagagattcttctcccctgaatgctcctctgaaatttagttgatgtgttcatttggcaagagaatttccaaacagtcatatcctttcacatgttgtaggatgtagggttgtgtcatcacaagtctgtcccaccactgagcacggccacttgtggagactggatgggggagtttgactccgtactggttcggtgctccccagaactgtgggttctcaggatcttggacatgggggaggagctccagctagtccctgcagaaattgtctttggcttgatagtggcaggcttggtggtgatcgtggctgagaatgcaaagatgccttctttcagagactagactgtgactctgtaggcgaaggccttctccatgtcttcccactgttgatcacaataaaaaaagaggcattccatggtcccaaacagtttattattgtcatggtggaaaatggatctgtagaaccataccccacttctcagggttggcatgagatgatataccttttgcagggagaaatgtatgggaaaggaagcttattggaatgccctctcgacctctaggtacctcattggcatagagaactctgttttgagcttacatgactgtagtcatgcctcttggtccgagatgttagagatgcttcatctatatgtggaagggcttgggcattgcccttcagctactgataaccacaaatctatagggggctatggctatatgacaggggattggtgctgagagcaggcgaagctcctactaaatcttcagggtctccagggcatcaagcctttggctcaaccataccttacagtccaccaccctgcagtaggagatctgagacttagggtcaagtaaaaagaggtgtcatttgctactttccttcttggccacatacccaataccacatttgttggaactgtggctgccagcctgccttgtacctcaaaaccccctttccttgggtacatttagaaatatgtttcatccatggtgtctatgtaagcacattgtgatctttcccagaccagtgaagaagagctgcaccatctcctattttccccttggatcccagagacttgacaatagcataataataatgtggtgctagaaagagatttctataaaacaaggacccgactttgaagataggctgctattttccaagctacattttatctccttggcaaaaatgataaatagttttggtttttggtattctaacctataaaatgatggcaaaaatatcaatgtcatgaatttcctgtgagtgttcaaatactcagcctatactaagttttagcaataatttccatatatttgaaatcactatcaaattttgacctggaaagagaaataaatatttaagtatcaatacatttttttctgagaacctatcttaccacaggatggtaccaagtatcaaggtgttaagtagaatcatttatcatagagagcttgtttctatgaattatgctaaacctatgaatgctttttatagtaattaaaattgttttctaagttacaattagaacatgaccccctttctctctccccaactcttcccatgtaaccctctttgctttcatccaaattcatggcatctttgttatttaattgtagatagatagatagatagatagatagatagatagatagatagatagatagcttgtatatatgaaacacatagcattcactgtgatattgtaaacctggtcagtccatatagtgttacctgtatgcatcttatgccagggctgaccactttatagcagataacaattggggagttcttcctcagggaaaaccatttctccagttcttatcatttccctattgtccatagttcttcctctagtgtgaacctccttatcttccccagttgcatgttagtatggccattggtgttgtcattgttcaggtcttatttaggcagccatgttgatgagactctatgggtgtaatctctctggcatttctaggagacccagtctcacagaaagcttgctgttcctctgtctctcacactctttcctccacttcttcagcaatgatcactaagccatgtgaaataagatggcacttggctgtaatgacacccacacacagtgtgaggactgtgagaggttcctaggaaggtcagtagatttttttccttttaaacaggaaaagaaaaagatgtcaccaataagccttcaggggaataggaattacatatttgcctacacattattggcttatcctaagtcatggcaaagttcagttttattttataaaagtgagttgtcttcataaatatcagcaatttcctttaatatcaaaaataatctgtaaacttaaagtgtgctagatctcttgcatatataggcaagtgctgtgattgacttcaaaatatagtcaaatggaaaattgctctttgaaatccaataagtaattgatgatatttttgtcacagttttagttggcttacctctgcaaaggaggaggattgttgagtgaaagggatgagggaggaacccaggcaatatatttcaatgacttcctgacataaaagccagtatgtatgagcacagaagagaatccagcatagttaccaaatcctttatgactttccatgtaccttctttgtttcttgttatagtttcattctctcttcatccccctgtaagagtagatccagacaaattaattgaaatactgtaatatgcctagatcttgcctccaaggctaaggcctagtccttgatctgtttgccagtgaggtatacaatgtaggcatgagcagcatactactttactttccagcccttattacttattacatgccatcagtcctgactatttgaaaggcaagacagaaggaccatttaggtctgggtctttgaaggtacacaagacaagatcatgactttatctagaaagaaagaaagaaagaaagaaagaaagaaagaaagaaagaaagaaagaaagaaagaaagaaaaggtttctttgttttccttcgaggctatgatttattaactaaggaaacataaaatgtgttttcagattttacttcagattgtaatgaaattttagaaccttgggacaattttcttccaggtctctccttggacatgaatgaaagtcatgagtgttgtactctcatgtccttgagtttgagaagtttgtggtcaatttttaagaactgtctgcaaagctatacatgagggtgatcagtgcttaacccaatattggtttagcctttcaccttttcttttaatttactttacatcctgatgtaacccttctacctcctctctccctaggcctgccctcacatactgctaggcctgccctcacatactgctccctcagtgccacctcaccttctcctcagagaacccccatgggtaccaatctacctggcatatcaaatcatagcaggtcgaaatgtattctctcccattgaggccagacaaggcagcccagctaggggaatggcatcaaaagcaggtaacagaggcagagacaacccccagtcaaatttttaagaggcccacatgaagaccaagctgtacatctgctacaaatgtctaaggggtccatatccagcctctgcatgctctttggttggtggtttagtctctgtgagccccatgggctcaagttagttgcctctgtagagcttcttgtggtgttcttgacccctctgactctttcgatccttccccaagtctcccagagttctgcctaatgtttggctgtgggactctgtatctgtttccactggctgctggacagttatgctagtgtcttgtttgcaagcatagcagaatatcactaagagtgtcaggatttagatctcccatgggggcgggggtcttctaaagttggggaagtcattggttaacttgtacctgaatctctgccccatatattatccctgcacatattataggtaggacaaatttggggccaaaggttttgtgaataggttggtgttcccctccctccactggaagtccctcctggtccatcacctttttaaacagacagcttctattatatcctcctatttcattcatattagtcaaatcattagggaaaatcaatcgtggtatatccagaaaccctcccctcacttccatttcacttcttgtgtgccgatgtcattgctcaatattcattttcttcatagttaaacggggaagaaagtttgaatgaacttttacaattccaaactgtctgtatagccttgaacaagacatactatctctctggatgtcacatttctgttatccaaaataataatcgtcttctggatggtctgagaaaactttccagttccacaattccttaatgattatcaaaaaatatattcaagcagtggttgtcacaatgcatgacaattaacattctaaaattgaaattaacaaaggatattttttccatgttaggagattttacgaatttcactgtggaattttaatgccttctggtcttgagaacatttgaatcattcaagatgctaatcacaagagatcctcttgcttatcttaaaactgataggtagaaagaacctaggctatcttttccacttgaatcccacatttattctttaatacccacattctaccaacagaggtaacatctcttgtaatctcccttctttggccactaagcagctaatgctttccagcaagtgatggagtaatgttgggaactaaaaagggggtccctagggaagggggggactcacaccccgccagagttttacctattctctggtctgtcaggcatgggagagctgccatacactttccactcatccctgggtgggcattcaagcctctgacccactcttcagcgggtggccaaggggcagccctacctggggatccaggagctaccttgctaaagccaccagggttatagaagagcgggacgagggaagaggttcccaacacctgtgagagtgcatgaagcggatcttgatgagcagagactctctatggttttaaagctttattatagaaaggcagggagaaagagagaagggagagagagagaaggctagagagaaagagagtaagagggagagaggagaggagaggagaggagaggagaggagaggagaggagaggagaggagaggagaggagaggagaggagaaggcaaagagaaaggaaagagaagagaagacaaagagagaggagagagggggtgagagtgaggggtaagagagtgagaagtaagaggtaagagagcaagcaggggctaaacagccctttttatggtcctcactattgctaggtaacaggggaggagtttagcttgaaggtcagaagcttgggccattgcctacgtgactactgaccatgcttctcttgtgggggttgtggggggcagtaacttaggcaggagccagagttccaggagcatgagggaacgcctaccgtgccatttaggtgaattatcacaaacggggttcagacctcagctcaactggagaccatcctgtctgtgcagagcccatgccccacagagtaatggcaaagagatggctgtgtcctcctgacagagacagagtggcaaaagcaatgacaagacattttgtgttctcattttcttctcttgttggaaccgcttacagaagaggcacagcccacagcttacctgtcaagttcctgcacccaccatctagggaagtagagacagccaagaaataacattcttctcttttctgagatgagatcacatggggtctcccagaaataaggaaatggccccttcagtctttgttgatggaaataagccagggaaaagtgaaaaataaaaacttttcttcattaactaagataccacaaaaggtatatgggatataatatgccagcccaactgcagttcattattagaaggtagacagatagaaatgggagacctttagcaaaagtccagagaggccagcaaacacaagggtgagagcagcataaagttttacggttctttttagtttacatttttatgtttaaaaagtgaacatttaaaatttaaatacatagttttaagggtctaatttttaaaaatcttgtcttttccttcatggcaggtcttagatgaagaaaaattaaagcagttggtgttgttaccactctgatgaatcacgtgtctgctactaaatgacaagctatatttaatgaatattttttattcattaaaaagcactcttgtacagtgaatggaatgttaaccttcttcagaaacagtctgcaaagaaacatttattctctcacgattaacattttcaatataatccgtgaccatattccataaaagaaaacataaatttattttacaattaacaaaaggagcctattcactgaaaacacagggaaagcattagagaaaaagatgtttgacctagacactggtccactttgccttgtgcagatggctggatgtttgttaagatgcagaagtcatgaaagaaacaggcaaaccgaaggaagaggggtgcatgcattgaaaatactctccctttctcactgactctcattgtgagatggaaacttctcaaagtaagagttcatttgcttggcttaatggtgttaattaagcctgggaaaatgcctttattagcaggtacttttgaagtgagtaaattcagagttggacacccatgatataaccaatatttgatatcttcagggcttaaactcctctctccataaatcaactggttttgagtacacggggatatcaaaagagattggtccagagactttttaggggctgtcttgtatactcaaatcagggacgttccagatcttctgagattctgccttgtacctgtgatatcattaggaacccagggagtgcactggctttggatggttccctcattcttcattagctgtgacatttcctgtaggcatcctgcctgccctacctgcttctaatgctatggtgagagaaaagagaaggttagttccatagatggcagtcatgtcatagttctttagactggttcagctgggaacacaccacccacgccctcctggtcctctatagacaagggaccaagtgcactctggcaataaggaaggagagatgttgatattattattaagaaaaaatgcacaacattgacttctggaatatgctattagtaagtagtaaagtatgtcttttggatgttcttatttttatgtgcatatatttaaatcctaagtactgttcatatggagtatatggtcttagaatcataatataaatataaaactacttcttagttcaaatgttcccttctgccttttcatttcaaactttctagtaactagttaccaagtgttggtcactccagcttcttccagtgttactcagcctgaaccagagaaggagcaacacttttttcagacagtgaagagctacaaattattgtgcattttggagatggaacaggaagttaacttaattttttaagaagacagcttctcattatgtagtgcggactgaagctcagactgtggccatgtctgtgtttgtgactttgactgtggctgtggcagtggaagtggctgtggcagtgcctgtagcagtggctgtggctgtggcagtgcctatagcagtggctgtggctatggcagtggctgtagcagtggctgtggctgtagcagtggctgtggcagtggctgtggctgtggctgtggcagtggctgtagcagtggctgtggcagtggttgtggcagtggctatagcagtggctgcagctatggcagtggctgtggtagtggctgtggctgtagcagtggctgtggctgtggcagtgcctattgcagtggctgtggctatagcagtggttgtggcagtggctgtggcagtggctgtagcagtggctgtggcagtggctgtagcagtggctgtggctgtagcagtggctgtggctgtagcagtggctgtggctgtagcagtggctatggctgtggcagtgcctattgcagtggctgtggctatagcagtggctgtggcagtgcctattgcagtggctgtggctatagcagtgtttgtggcagtggctgtggcagtggctgtggcagtggctgtgacaatggctgtggcagtggttgtggctgtgtctgagtctgtttctgaggccacagctatggctgtgtctgtgtatgtgtctgtctgtgtctgtctgtgtctgtgtctgaggctgtagctatagctatggctgtggctgaagctgaggatgtggttgtagctgtgtccatgactgtgactttctctgtgtttatgactatgtctgtgtctgaagctgtggctgagtctgtgtctgaggctgagactgtgattgtgactttgacagctatggctgcgtctttgtgtgtttgtgtctgtctgtgcctgaggctctacctgtagctgtggctgtggctgaggttgtggctaatgctgtggctgaggccctgactgtggctctctctgtgtctgtgtctgaagctgtgcctgtgactgtggttgtgtttgtggctgtggctctgactgtgaccatggctgtggtagttgctgaggctgagcctgtgactatgtctgaggctgaggttggcatggaatttctaaccccataataactttgaactcatatttgtgatcagtctacctcagcattccaagttctgaagtttttattgtacaagcagtctacaaggctgaaaatctgtgtgtgtgtgtgtgtgtgtgtgtgtgtttgtttgtttttggttttgggtttttttgttttttgttttgttttgttttggttttttggtgcatgtctactaagtgttctaccaaatgagctatatacttccagctcaattttggtcaattgcttcctttcagaaactaagaaaggggcccaggagatggacccatgaacccataaacaaggacttgtaaaatttctttataaagaaacaatgaaaattacatctccaggattctagaatggaaagaggtaaaatatttactattttccaaaaaataatgaattctgaaagggtgggccttatccttattcttattatttatttgttggttggttggtttgttttgcttcacaaactatgtggtctagaaaagtctcaataaggttcagaatgtctcattattctcaacatacaatgagaattgctagaggaatattaacagtatatgcctccctgtcctgtagtatggaatagacaaattaaagtctaagggatattggttttttttttttttttaatagcaaagcatgtatggtgactttcatcagcattaagtgtgctaagtgacaagagaaacacacccagggtaaataagtttatgtatgaccaaatgtgaaagactaatgatgctttaaattataatatatggcttagaaagttcagttcctgtagctccccagacttcagtatgggctcctcattgttttgggaagacctagtggacaccaataatatttaatacttacgtttgttctctaaaacatagtgtgacaattcaatggctagtcatatctgggagacaaatagatatattacaataaaagatggtgaaaccatggaaatgggtataaaaataatcctatttaacatcaatactaaagatagggggatataatcttcaaaacacactcatcgatactgagtttaaaattaaactcgcatctgcctccttcagagccactcactatagtatgaaaagcaccgtgaacacggtgttagagaagaaagaatccacaaaattcctcatgtaaagtcacgactacgtagtaaaagactactcacttttctccagacagtagaaataagcaaatttcattcatgggttccgtaatctgtaaaagtaacaatgagtttttttttttaatagagaaaataaagtaacatttacaaacaaaattagcacctttttttttttaacttaaaagcaacgctctccagttctgattgttttaatctttaagtcaatagttccatgataggcagagcaaaggggaatgaaaaaaaggcatctgaggaagtaataaaaccaaaataaagaggaaaaaagaaaaaggaaccagaaggaagcggttgagaaagaacacagaaatccaggctgtgagaacctatttacgatgtagccactagatggcactgtaacgttaggtgctgtctccgcttttttttctttcttttttttttaaaacaagctatttgctgatttgtattaggtaccatagagtgaggcgaggatgaagccgagaggatactgcagaggtctctggtgcatgtgtgtgtgtgtgtgcgtgtgtttgtgtacgtgtgttctgcccctatgaggctgcagcccttgtgaagcacttggtcaccttttgcaagaaggaatctgaatcgttgcaacggaaggtgcggactcgtcgtggggagatgttgctcctcactgcagatggataattttcctttttatcaggtaagccatctgattatctcattgtgatcttctttggtggtgaattcttacctggtaaatccttggggagaagagcccacggaaataagagttggggcagaacaggaagtctatttttgcatgtgaattcggaccaactgtccccctcctcctcccctcctcctcctccctcctcctcccctcctcctctcttcctcctcctcccctccccctcctcctcctctcaaccttccatgaactgaaatcaggttcgttttgcagttcagcattttgatagaaggatgagattctttggcctaaaataacttggcatcgggccagctcttgcctttgcttgcctgcatcctcctaggcaaggtcttgtcttgaagccccctctgtcattggtgctttggaactggattcgatggctgtgaatagaggtcatatcgctcctaaagatgatgcaaaaattagacctcacagaggaagcaagaaggcagcggggctgctcctggatcctagcattgcaggggaggcagcttctttgggcagaggcttgactcttggaaaggagtgcctcctccccaggaccagaagggacagatgctgtttcccccctgactcttccttaactacacttgcaaatgaactttagcaaagtgataaagagtcccgggtttcagacaatgccgggtgggaaggactgacttacttttaattagacagaggtcaccaacggcaatgatactgcagatgtgctccattgacacaaaaccactgtggaacctcttgctttctgaacagggcaaaaaaactgttttcttcgaggtggctgtgaggcttttccacgccccttccttacctctcctggcttccttctctcctacctgtttgaggtctggatataaagccctcttgccacatctacaaagtgtctgccgcccctcctttcaacaaagcagtccaaataagcttgtgagcagagacgctttttctttcgtgtgtctgacggaaatgactgagtcaagcctgggtgtctttctgttcagatgtgcatgtgactaaatattttctaagctgcagtagcaaagtcgcaaattgccaaacgctgttgctatcacacgtaggaaatgtggcttctcctcgggtatggatctgcaggtctgcactgtctatctggtgcgctagtggagtggcagagcgtgtttctccaacccgcgctgtaaatcatcccaagaggaggatgccaaacaggaataggaaaattccatgctgaggttgatgcttcctgattctgtccctcctgcccaaggagagccagggtagctcacctctcccttttgctgcaatacctgacaggccgggggtgatgcaaatgagagcttccacacacgtttgcctcctcgggaagtctgacacttccctttccttccagaaacagattaactgtggtggaaaaactcctcacaaactccccttcctggctaccgactggtaatgccatcaaacactgcatctatcttcgctggaggagtgttgcaatttaggccttcctccacaaagctccttgaagtgatttttagatggtgtctattttaggaacataatgtgtagacaggaatggatggccacagagatttacgggaaaacaatttcgcggagaagatgaggtagcattataaactgccaagacccagcacaagtggctggttatgtcccatagacctggcagtggcatctgctcttttaaactccctgccactcacttctgtggcttttttcctcgctccattacattgtttgtttttggttttcaaatgtctctttcaaaggcttgaaccggagagttcgttctggtaaaaataacacattggactttgctgtcaatactatgtctccatttacgcgattcccccttgctgagaaatttgctatcaggagactcatttattacagcaattcctctttaaggcatggcggagagggtttctccatccgtggaggctgggaaggcatgattggaggcctaattaattatacagtatccaagaaggcactggggagaagagcaaacaatctgccttcccatccaaaaagatcaggagcaagtggacagacagaaggacacaacccaaggaccagaaactcaggactccattccactgagaagccttctctcgtggagagttgctcaaaattgacacacacacaggcacatgatgatcagaacacattatctgagtgttcctgatgatgaaagttagcctgaatttaatttccattctctgtggacagcggagatctgggtagtcctcgggggccacggcagtaaaaccaggcatgccaagttctatccaagttgtcctctccctccaggttaggtgaagaagatgaaatccgccaggtactcctttccattccccttcagcaagaaggcctgatctgacttggaagagtgggagggggagaaagagtgcagggaaagaaagagaaccacagcaatccatgggctgagatgtgtcccactctggatcagtgcagagaagctcagggacgcaattacttccctttgaaattctgaaatgtcaattaagcggaatttacagctccgtttgtgtttctctggcttagggtaggctgtagaaagagacttactcttggtgcacacgtgtctgaaaaatccagatgatctacaaagtggctccacttgtgcttgtaactcttctcttttatctacgtacctagaggtcaacttattatagagaggtagtacttactttgctaagcagtacttcaggaatgtaagaactatgtaatattgataatttgacaagggaagaaatgaaggctatgagactagattgccttgccaaatgttacacagataagtggcagagcacaaacttgaactcaggcagccttgccatagcttctgtattctagaacactcatgtctgtgtggtggtagaaccactggttagccctgactccgaaaaggaaatcagcccttgccagcataactcctctctatcctttcatgccaagatgtcaaaaagtgacatccaagttaaatttttttttttacaaagccctctagttggtgtccgaaggtgttgaaagatggaaattacaaggaaattcatgcccatatgttgccttcagtctagtaataaagttagaaaaaaatgcacaaaggactatcaaaggcccttaaagaaaaagaacaccgcataaagagatgataggagagaggggcttgaagagaaaaaggaggtagaaatgtgaccttgtagttgagacatctaaatgagtagagggatggagacccttgcgtataagaaaggaacaatgattgaaaaactgggaacagaaaccgcacagaggtcctgggacctgggacctgaggtgatgtgagaaaaggaccctctgtatgggtgggtctatgcagaggtaagaaagagctgggactaacagacacccccatccccacatctgtgggttcctggtggctggactcagactcttaaagtggtttctattaaaaagcatgagggaaattggttgaataaatttaagccttgtattttatattggcaagtttctaggtttagaaaagtaatctgttcatatttacaaggagcttttttttttttaacaacttgttaagtctctgaggaaaaatgctgtcattcctagaatgcagtgatgttggctagaaaaatgttacaacgcacacacacatatacacacacactcacacacacacacacacacacacatgcacacacatacacatgcacatacagacatacccatacatgtgcacatacttgtgcactcacacaggtgcacacatgcacacacatacagactcatgcataccacatgcacatacacacacacacacatgcacacacacacactcatgcacccaacacaggtgcacacacatatgcacaatttgatgaaagattctgggtgaggttattggtgagaatgatacagactatacatacaagaagaaacatgtagaccggagcttatctgcccctgcagttggcacacaacagctggccagtggtgttcaatcaagtcatgttttgcaagtaaatgagtgtgctattggaaaaccagagctcagcttgaaattactgctttgtttactcagaatccacattataagggagtataacgtaaataagaatcattttagacttcacaactacctgttttctccttgttctcagatcagaccctagaattttctaagagatgtggatttcaacttacaatagatcctggtttcaagttttctcctatgagcaataaaaaaaactcttgttcagctcctctggtactcccatgataacaggcctctagctttaatgcagtatctacggactttctgtttgtttgtttgtttctgttttttgttgttgtttttttttaatatcacctgtccttctttagtaccatataggcctaactctatgcaaaactggacattgattctgttttgtttgcagtatgtttttgtagctggctcttttgtttatgtctctggttcatttgagtcagtttcttgtatgcaattcggcttatggctcatgctccttgctttgacttgtaagcatctacttagtccagaactctttcttgaaaagactgcattctctatccaagttgaactttcttagcaacacggccggtgattcatttgtgctattactatcatttattttacactagatatacaagacaccttttaaaggaaatgccaccaaaaaagtaccttcttggaaaaccttacatagatttaaatctgttgggtttttttaaatgacccatattctcccattgcaacctttgggttcaagtgtaccataaatttttccttctccttgggaaagcatttgtttatgatactcccagaaagcaaaagtgataattaggtacagcattttaatgaacctaatcttcctgagaggagatggctagttatttcccagaagggtccctcctgcattgcacgtcctctgctgcacacatgtaagtgatgctcatgcccttcattagacgctgcttagtcacctttgtctctcaaatgccattaggggttctgttgtacttgtaattatacttctcaaatagagttggttttattttagatgctttgggcctatgtaacactacactgaatgctgggtggtttaaactataggaatatagtttgcatgagatcaggctttgagatattgacaggtatggttccttgtgatgcttctctgcttggcttgctggtttcatgctctgtgctctgacatgtttgtttcttctgtgatcctgaattcacagtgcttgctttgatgcctaaatttccacttagatggagaaaagttagattgtgtctaaccgtgtgatccaactattttaaaggccttgcctccaaatacacacagatatggagtagggaagtttggctttaggcaaatgaacctagaggtgaacacgattcatcttgtgatggttgcctttggcttgcttatgatgactaaaatacacaaggaagactgaatatcaattcagtctttttttgttgctgatgacatgattaaaattgtattaaggatggattttcgtcatccatacccttctcccacaataaggagtagtgtgggcatatgttgatatgctaatgttgtaattagctaattaccattatatttaaagaagcagcataaataacatgatgtggagaagtgaatgcatatttagagccaccatctgtgctaagcattaaggcttttactcattttaattacaagaggaaccaagatggatgcaaaacttaggagcttatggacaattttataaataaaacgatcaattccaaagtgtttctataagcaatagaaactgggtcaggctcatttaaacaaagtgcaatgtcttgggaaaatgttgcagcctagagcccaacatttgcaccagaaaatggcaggaatgaagcaagcagtaaaagtagttggcccaaggttggacttccgatgctgtaatctcctaaaacaaaccagctaactgttctctcttgctgtttgtggtacagatttggaattacagttctaacaaatcagcgtctggctgataagtttggactatccatccaatcattttaattaataataatctggaccttcaactgtcacttctaccaaaagattcctatgtaggaaaaaacattgcaacccgatgaaacttaaaacagtttacatatactatgttaaatcataatctatgtaaacaaaaagatattacagggccattgaatgtaacatatcaaataacatttaattctgtacaaagttgctgaggatacaatagcacaaatcccaaaaagatacaaatgtttgtttcccctaaaaaaaaaatgaataaaactagtgttagaattggtagagtctgctatatgcaattataatttctattttcttgttataatttgtttaaagtcagaattatttttctccttttaataaagtagagaatgttcattatgtagatctaaaataaaaaccataaggaaataacataactttaaaacattgcacaataagcattagtactaacaatttagttgtgcagtttttcccattttattgatttgtttctaaattctttagtttgtaatggcagaaaatatttttgaaataagaacacactgttttaaaagttaaaataggttcaatggtagagcacttgtccagtatgtgtgagaccccaaacttaatccttaacattaaaaaattaaatatagatgttagaacacattatttatcaaatggaacttggcaaatcaatttataaggataagcattacataatcaaaatagtgaccaggagataaatgagaaaatagccaaatattttaatattttatcacctagaatattaattaaattagtccatatttaatatattaatttgctgttttagcaaaattgtaaaaatggaaattttggaaagaaatgtgatacaagattagatttgatataagaaacttgaaattgtgtaattttgtaacctaatgtctccagtcagacttcagaaaattttcaggaaatttacttgtacttatggaatgtctattattggctatgggttttagtaggggaaaaaatgagtatacactaaaaaaactaaagatagtaaacgataaatgaacaaagaacaccactaaacactaagccagaacatgacatttttaaactgtgtagaactcaactgatcacattggcaaaatcaatctatgtcaatgttccggtgagactatagcaaaggcagatgcatgaggctgagccagagccattggcagagcgagggctacatcctctttcaagaactgatccttgaaaatatgaaatcgcctggtaggagcagggaaaggcaccctgtaaacaaggatcgatcgttaatatcatggattaatatccatacttagattattttaaggaaaattttaagatttaaatactacagagagtcaaataaaataaggaacccagaggtcaagattttcatttgcccactcaaagaggagaaaaaatatataaagaattctttcacataaacatgtctgtctaagaattcagtgaattgaaaatcctggaaagtgcaactttgagagacttgacaaatatcaccagccagcagttttgatcctcccctggaatgtgatatgccatttttaaaaggccagtggtattttgagctatgtaagtcagtgtgtttggtacaaaaccaacgagccaacaggttggtttgaggactagaataccataatctcagagccagctgacctaagcaggtcagatttcagatcattggaagtgcctggaagattgaacaccagtactttagggcattagagacaaatagttcaacctgtgtgaaggaaggcacgagtgtcgtttgaagaatttctagctggtaagagctagctctgaagaaatcattgagggaaggaaatgaaaataagaaggtgaacttcttcaccccactatagagtaatgaagtatcgaactccaggcaacactgtagagtaacaaagtgacaaactccagcagcttctcctccagagagaaaccttacctgctcaccaattagccacctctcctttgtcactatgactttgttgactctctactctcgcatactcttcacttttaatcttgtcgccatattgtgacatttatttaaaacaaaaacaaaaacaaaaaacaaaaaacaaaaaacattcagtcatgttatcaactcagtgtttagtctttgatgctctcaaaaatgtgtccaccccatcaagactagaacagtcttaaaaataacttttgcagttattttttatcttaccccataactttggtgcatttccttgaaaacgtttaggcatccatcatatcccaactgtctttatagtcatataaaagcactcttccttcctttcactgttgatggttatttatatttacaaaaacaatttatatttctcaatgttaatccttagtaaggcagtggtatgaagaattgttaaatttttcacagccatttgctcctaggaaaaataataatctataaaatgaaaatccaattcccttaaaggagtctgtttgatgatgctgcaaaactatttcatctggagccccagggctcatcttgtttgttcgtttttttgtttgtttggtgccccaatatcatccccaaaacacacctgcacagctgtgtgagttaccagctggactgattccatttccattgaacactatcacgccttggaaaatgtagcaggtagacaggtgcagaccattccagcttacattttaagtcattttcaaaaatgagagaagtgatcgagccatgtcaaggagtaaaaagtaattgtaaatatgtattgcccgtgacaaaaatgaccattagaatactggaacacttttctgccaccaggaattgagcagcattttaaatatgaaggatttccagatgtgactagcagtgatgttgacagactaatgaggagaggctgtaaaaatttaaactttatatagcacagtcagctaacaatctataaatgggccatgcttatgacatatatctttgtggatagtaaatcacctaactgtgcacaataagccaatgaattgcataggtcagagtacagtgggtttgcggatatgactctgacctatttatctaatgtggcctaccaggaaggagaaatatttatacttacatgaaatcgctatttcaggtttccacacacctttctgcaagaccaactgtttttcatattctccatctaaatataaattaaaatctgttaaatgtaaaagaatctagatattaggttagatatttgaaaatttataaaattataaaaacccatgccacgtaagtccttttctctagaaacatggtcattttccattaaaaagtaacttagttagcatttgtttatgattgatgttcacacaattttgatatttaatgctttaagatttctctaatttctaatagcaatgcatttaattcattgatgctaaagctttaatggttcctcaaccatagtaaaaatgtacatgctaggggctaagccattgcttagcacatactgtgtacccctgggttatatccctggcaccaaaactaacaataatgatattaactacataaacaaatttgaagatcaaaatttttattctaaggctgagtttgataactgatctgcttttaaagtacaattaattgtgtgtgttttgctattaacaggcactaatcgagattaagatgcaggcaattgagtccctttaatttatgctacacggataaaatatttatcgcattatattagttttaaagtttcctgctacaataaaaggatctgtgcatattatcactttgctaagctttagtaaacgtgttgtgaagtaagtcagcaaattgtgaatgttcatttaaacttttatcattccttactggaatgaatgtaagcattttctattgatctaactcatctcctttctcctgtttctcagtgagcagctgacctctatgttcccatcagcgctaacatgcacattttacttaggctgtcgagcctagtgtgatgggacatgcctggaatactccaactctgtaaatattgtcattttgtttattcttatagggaatagaagggccgttctttgagtggtgggatgcatcagtaactttaggtgtgtgctggagttttcagtcagtacagagagagtcagtttcctttgctagtggtggccttgagccagagtggagagctgaagatatctcctggctcataagagcctcagtgaggaggggtcgtcacccaagctccatcaccaaggggaaggcacagtggactgaggagaaatctggagcttgtcgatagaattttcagatggttagaaacggatagcaaccaaaagtgaaaaagacaactgccatccaaaccaagctgaatgaaatgggatgtgcctgaagaccatccaaggaagtccaccttggccactgaaggctggggtatgtggggagatgcattctccccacctgcgcaagacagagcagggatgctagacattcaacagtaatcatccgatgattcggggaaggtttaggatgggtagtaagagaaacctcaccaataagctgctgtgagatgaaatgaatggccattaggagaactggatcgggggtcctagaaacgagtcctgatccaagtcatagcatcactgaaagggaggtcggcactcttaaaccaaattctcagtacaccgaattattaactaggaggagcaggtgggggcaatgtggggctgcgggggaagggagatggtcaagctgctgctaaggcaacatagcagcaagtaagaaagcaaaagaaatcagagagcaaggggcaaaagaagcaaggggatgcttcttcatgattgagcttttaaaggggaaagggggaaatatgtgctggagtgaattagtaaatcctgactggacatattagccaaataattaattcttatagttggccctcggtgtttcatctcaggaatgaatcagtagccaaatgagggaatagaccttggggaaagggagaagaaaagatgtgaaagtgcaaacctgtgtgtactgtttgccatgccagagcctgctagaacaccttcagcaagaagatcactatgaattttgaggccatcctgggctaaaaagtgatatgctatctcaaagcaaacaccaccaatggcaacaacagcaacagcaacaaaaatcttccattatttaaatgtggcgtcagggtttaaaaatccaatgcaagatgactggcttccatgagctgtctaggtttacctcttaccctgtggcctatctatcctgtagaagtaaatgtgtctgtgagttattgaagctgcttccaagccttcgaaacttgttcattctctgtgacatcatgacctctccttcccctcagtaggagtcactttccttctgagatgtgcctaggcccagtgtggacttccatcacagcaccaactgtatgcactgtgtggtgtctgcttgtctttccctccataccttctttgcagtgtgatgtagttagtatcttgtgtgtgacaaggtactgtcaccactgtctgtttcaactttgtatgttcagtaattgcccaacagaagtaagttaaatgaaaccaaaataagaagttttacattattcttacatatttactaaatctataatttaaggatgttttataaataccattatataaaatatacctgaaaagcatataataattttatattatttcacacagattctgattatatcactcagatacactcccatcagtatatctttcttctaatttattctgacatttttctcaagtgacaatctgcagctcttatgacttaattcactatctcaaaattttaatttcttcttttacatttttcagacatccattgatgttggcttggagccaactcttaataacccaattattttcatagttataaatttactacttataatgctattataaaaacagagcatttgtaaatgcataaagaagaaaataatattcatgatctcataatttcttattctccatattaatcatgggtattgcttaatatttagtattttactctacattattccttttgtgtaataggattttatgatgttttcaatatatgccatgtgccatatattcaaatatttttagtgccatcagaaaaaataatataatgttaaaacatttttactaatagttttaaatttataaaatcactcctatcgtcatggaaaatttgtcagatcatgacttttgagagaaagtttaaaatgtcaattactttaaaaatatcaaacatgggctggatagaaggcttggtgattaaaagcagtgactgctcttccagagatcaggagttcaattccctcaattcccagcaaccacatggtggctcacaactgtctataatgagatctgatgtgccttctggcctgcaggtatacattcaggcagaacactacattcataaatattttttaaagaaatatgaaatacaactccaaatctgtgcttttgctgagacaacggaactccaacaacatctttttagcatctacaagataaaacgagaagggcttgggcgtagactggggttaagaccattctccacccctctcttgtgcttggttctccttggctgaaaagcacacataggacttgcctgacactttctttcactctgccaccatttatccaaaacatatgttatagttcattaaactacttcaccttttcaactttcaagaagagagacaaaatgatttttacatcatcagtaataacctgtagaattacagtgtctaattgatttctcatgtttttaactttttttctagcagcaactaacactggactcttcagctgaacatttttaagggatttaaaatatccattagaatttctctttcataacatattgcataatattagattcagaagagggatagtaaagcgtttcccaaattgttatttattcttcaaatatgtattgttgaaagtttgctctcccctaaggcaaaagtgccattaatatttttcttgcgatctaagaaccacattgtatattaaagcagactaacgtagtattttctcttttattataaacagattctttctttccgcatcccagttcctctccacttcaatctggatccattccgtttctgcctgtcattagaaaagaacaggcttctaaggcataacaaaataaaacatacaatatgatgaaataaaaatcatcacgtcaaaactggacaaggcaaacaaacagaagataaaaagccacaagagtaggtttaagaatcagaggtccactcattcacacgcaggagtcccatagaaatactaaactgaaagctgtgatatatatgtgtatatatagtatatattacacacacatatatatcatatatacacatatatataatacacacacacacatatatatacacacagaggacctggtatacacccatgcacaccctgtgcttgctgcttcagtctctatgagtttgtatgagctttgctgagttgattcacagagctgtgttctcctgctgatctccattcctgactcttacaccctttctacctcctcttccaaagggttctctgagctccaaggacacatcccatttagagctggcaactctgtaatattaaaaattactataattattagtttaaatgaaacggtagtcctttatatccaccgtcaatgatatatattttattaaatataattataatatgtaactctaagttagagataatcttaaatttcatggcttttaaaaaataatgctatgttcaagttcatctgtatgaccttgattagtggtgagttcagggacatttaagtgaccttgcctttctttcctacattagtaatagaatagatagcatctgtctaaagtaggactgtaattctgtatggctctcccctctgggttatatatccagaagacctaggaaattggttaatttcataaaaattccaggggagggcttgtttgcgagttcattgctcttgccagggattgaataagtgttgggctcctgacctcattaatgaaatatgagggcaatctgcagtcaggcttctggaagaacacttctcacctgggcaaacgccacaaggggaaataaaggtcttccttattactgctgcagcctctctagatgtcacactcttgagccgcagccatcctggtcagctaacattggtgctgatggaaccacagagtgtaaatccttggaaaaagtattgaaccaccccgtcagctcactggaatcctcatcttctgcactttcttagcttgtgcgatttgaagttgaggactcctagtcaaaagaacagttgactgtcttatatgtcatattatagaggcctcttctaaaattatatttagcattatatctatgattcacatttaaagtagtcattttaacaaatcagttaagacactgaaccaataacactctttaggccactgtaatagtattcataatattggggctccaagtgaaacaggaagtttggcatagtaataaataatttcctcatcattcattctcttatttgctgttaactaatgtaactgagtagaaaaataattaagacattacaattctaaaacaagaaagaataccagaaggatggctgagcaaccactgctatgcaatcctaacaccttgagtgaagtcaatggaacctatactgcaaggatctgagaggccatctctgaaagttgtcctctgccttttacaaacatacatcatggcatgagtgcaccatagttcacacatatgtgtaacacacacacacacacatatacacacacaccagtaataatataattaaattcataaaaagagaaatgaatgaaattttgaagatatgtaagaatcattttattatctttttgtagttcagtgcttttaaatacaattagagttgtaaaaacatcattgcaatcattttaaaacatgtacatcaagtatcaaaaataccaaatatcgacttccattcaatccaaggcaatctggatttttaccttctgcccctgaacatttgctgtctctagacatttcataacagaactattcattatgtcctattgtataatccattattctacctaaaatgtttttgagatttatccaacttgtgtcacatacattattttccactcattctctagtctaagtgtcatcttgtttaaccgtcaccatctattgatgatacatttgtgaattgtacattttggatactataaataccattgctaagggcatttccatgtgagttgggcataagataaaaactgtttctcttaggacttaacttgaggtcttttaaaacatcacacataagctgagaaattatctaattttctatcagaattactctcccacagataaagtctttggagttgtttttattccttgggaaatactttttcagggtgctggtgttattgtttacctgcacacaagcagcactgtgcttccttatctacagaggcaagactaagtggccaatttatttcaaaccttaatgagaaagaaagaaggaaggaaggagggagggaagggaagggaagggaagggaagggaagggaagggaagggaagggaagggaagggaagggaagggaagggaaggaggaagggggaagggggaagggaagggaagggggaagggaagggggaagggaagggggaagggaagggggaagggaagggggaagggaaggggaagggaagggggaagggaaggggggaaggaaggaaggaaggaaggaaggaaggaaggaaggaaggaaggaaggaaggaaggaaggaaaagagggaaggaggaagagaagacagacagacaaagacagaaagaaacaaagaaaaaaacaaaagaacaaagagataaagaaagaaacctctgttgaactgttgaccaagaatcataaatccattgataatatgtaccctactctgcttttaagtgggaataccttgaagggaaatgatcagatatagaaaagatatagggctgaattgaaccttaaagctgattggatggacgcagaccatagtcttgtgactgttttctgccttatcaaatttaaaccctgatttacagatgaagacacgttgtaggaaggtagaacaccatgtctttgagttttgaagcagctccttcttcctcatgggctccctgtaccccagtcttcatgtccactctctattccaggattttgattagttttacagcattttttttctccagtatataagacatctaccccttcctgataaagcctcccactgggctcaataacgtctcatccttctacacatagacaagcttcttcagaagagatttctcaaagtctctatttcttcatgtgaagttagcttttatgccagcctaattgtattgcatttcagcatgacacatccaatacagtgattactggcaaacaccatggtgcttcagggccctccgttcttcccaaactagattatgctatgacgttatatggtgttcgctatctctttgtaaaattctctcttccttgtctttcttgtctacaaaatggagatcactattttaattttcttcaaagattagctattaaattttaagagtcaaaatattcccaatgtctgccatctaaatcaagaatatattgtaacttcaggtcaacctgggatattcaagaactatgctgtaatgagaccctagcagatggggagtggggggacaagaaaatcaaataaagcaagaacaagaacattcattttcatcaatatatagtgtcatcattttctttagagagttttgacaaatcgtgtctctggaattctttcttctgctctccataaataccacgaatgaaattaactaaccaaagtgagttctggttcgattgactcacttattcttcattcagcagatatttataaacatggtcccaggcaccctgccacgagcagagataaagttccaactaataggattccaaggaacgatttgaggagcccagactggggcaaatcagcatttgcagttcagccctggctgcacatgagatcaagttgataatgttattttgtcttctgatttttgcttcctcatctataaagatcttgattccaatctacatttgcaaatcacagcttaaggcctcaagtcatgtttgccaagtacataaagtgatgcttggcactgatcaaacactttcaaacactgtcatcattttgttttgcaattttctcctaaatatcaaaacattatattaattttacatgcctcctatacccacagccctttcctttgcttcctagtatactgtcttgcccttgagttcaagcctaccgaggaagcttcttagcaacattttcctctcccagtgtcctggaggaattaatcattaatcacatcctcatctgtatttctgtgtttcaaaagcctgtgtgtgtgtgtgtgtgtgtgtgtgtataatttactcagtttatacagtttatattaaaatagaaataacaactagctcacaccagagagcctcagaacctgttattgcttggttcttaaggctactttagcaatcacattacttccacagtggctgtctcacactgggaaggctggcaatgcagtagttgctccatccacaaggctgggtgcctcagcagtctccatatagtggccaaaacatggaaggtatctggaaggtacctagaccttagtcgatggtggaagctaggtatttgggtaccactggtcctgatcatcaataaaggagtcagctgcagaaaccagatggtcagtaaactcaacagcaagaggaaaggtcagcaagctgtgaataagcttccttccactaagtctctctttatctagatggctaccagaatctgctacccacacccggggtgggtttccccacatcaattaaggtgaccaggaccattcttcagttggtgcttcccactcagaggatgtgaatttgtggcaagttgacattaaaatcaaccatcgcaaataatgtccagtgtgtctctcctaatagaccgtgtctttcttcaaagcagaagttgtgtgtttcacatacatacacacacacacacatacgctcactcacacactcacatagactcttacgtatcccaacccaacatggtaagcagttcttcaaactgcttcatttttttaatattattaaaccaggccatgtatacaagccctgcatggcctacaaaatagatagctctaaaaaaaaaaatcactgaaatttcattcgttgagtattactttctcagtgcctaatttctatgggcacaatatatatttaaaatggtacgttatcaaataattttgctcggacttaacaaacaaaacatgtctctacaattcaatggcttctggatactaaaaagtatcttttactatgaatgataaaatatttggaattacataaattgttatatttaatcttaataatttatctttaaatcaacaaatatattgcagagtgtaatgcaactcttcagtcttaagtgaaatccttcattataaatatgcattgactcagtaacatcatttttccgtatgttctacatttaaagtgtcaatattttcatgttattggtttaatcacctcaatactttcttaggtagatgggtgtgtcaatttaatggttatccatgctgagtgacatttaggcatacagtcattccaatttttgacattattacatcctgctttttattttatgagtaaaaaaatgatagcactgctaaaatgtcaacttcttaaaatgtataatggaaaagtagtttgctagtaaatggtttcaagagtaaaatatataaataagcttatagactaataatgatagtgattaatgcagttttattgaatacgaagttttacaagtactaaatcactaactgaaaagatgttattctctaccttgatggtaactctaccctacccctaataaacatatatgtacatgtgaatacactatcattcacatcataaattataataaaaaacagttgagagaaaagcaatgtaaataatgtgaattgaacacaaatatttctacagagcacttcattagcaataagtattttctaatctactggtactctaaaagactacttaaaatcaagaactgaatgtaagggctttgtatatcttaaatagtttttacagtctgtatttccaattgaggataatatgataatcttacatatgaaaggttttaaacgattcctgtttagaccagctatctggagatacctgaaaaggtttacaaacactagtatttagagggagcaagttaacagggattaatggatgtgatacaaaagatttctaaaagctggcattttcttctaggccaaaagtagacagaagaattttaaaatacaagcaaaatgtaattgtcattcatttgccgatttttaaaaatatataaaatgaatgtaagatgttgagatttatatctaaatggttaatggaatttttaaaagttaatatctaactctaggaaaaggaaaatttggaatattctccttgagaaaagaggttaaatagccttacgactttcatcttcatccaatatcttaaaatttcttctaaagaaaaaaaaaaacaaaaacaaaacaaaatcaacacaaacctcatgtatttacattgacagtcatccagaacagcacagagtaaaagccaggataacttgtgagtggaggtggtgtcggatcaatttcatttccttgtgagataaagtaaataaacatgtggaccaagacagaagtaataaatagtgcttagccacactttaggaaggctgttgtctatcaatatatcatctacttatctattgatcagctatcatatatctacctatgcttttaagaggcatggtctctcacccattcgcaactttttcatcagaaaccaggggagaatgctccatgagacaaggggaatcatcagtggcgactgatggtagccatgcacactggctgtccacaggctttggtgaggaaaggacctctttgaaaaactttaattttattggataccactctatgtatgtttctttagggagttatggttgcctataaagcatgtattagcaatgaaccaaagctggagggtacaataaagattcttagagccctcgtgacaaacctgagtttgattttctataactattggtctctgtgttaggactgtcccaggcgtatctgtgaggttctacttggttagtaacaactctatgagatccaggggcgatgtactaacatcttcaggaattgaaccagactgtagctgtttaataagtaccattagtcagaatgttgaaatgaaaagcaaatgcgtaagtggtatgtcgtaaaaaggtatgaatactttcagggaaaagtaggaacatgaaacagatcagccttcaaatttataaactggtccatcgaggtagggaagattggaatgtcatccgtagactgatacactttaattcaagaactactacaaataataacacagttgagacgccagtcacaaacttgaaggaaccatcaatcgtgtttgcttaataaatcatcaacaaaacattatttccatttaatgacaggaataggagagctataaactctcttcttatgaaaagaacatattttgttgcatttccccatcttaaaatgttaaagttatgtgtatgaagtcaaacgcaaatcctggtatggtgcctcaaatgtaaactctgactacttagggttcgaggtaagaggaccaagggaatcactgttcagttcagtgccagactggacacatagtcagatctaaacaagtctgtcacatagcaagactccccagacagataaaagtaaacaacaacaaaaaagccagacatggattaaaaactttaataacattgttataccactgaaagcaacaacattttttactaagagttgtactttgtatacaaaatcagcattatctcattgttcatcttccttctactattctgatgtctctgctaagtaaacaaaaaaggtaagaatcatacagctcttatgataaatcagtaaagataaaatactgaaaaggagattccattttggagatgaggaaaccaaagggaggtatggtagcttcattcacgctgatgcatgtgccccttgtgatgtgagtatgctccagttttcattccggtggacagacagacggctggagatgaacggaaattgtaggcaggtagaatctcatttgcttattcctgttttgctgactaaacaacttgatccaacttgtaaaatcaaatattgtgtcaaagagtgtaataaaacgcatgcaagctacaggaagtggtgaaatgtcaaatgctcaagcattattctttgctggcccggattcgcctttgtgcttccttacagctgatggggaaagtgaagaggcatggcatgccatagattgatccctcagcctatgcagtacagttcataactgaaggagagcacactgcaaatctctgtttaccccatgccttgtaatatatatgtgcctatagatttggttctttaacaattggttgactcattgattgttatttaatgattactttttggtttagctctacagttttcctagtaactaataaatcaccgggtggtacaatttctaataatatgcctgctgaatatacaattttgatattttttatcatacgtactttgttttctacatgtggacctacttccaagcatttaaaacaatgcataattttatactaagatgttttgtatttagaaatgagacattcagaatgttatttgttattctgtcaaaagattatataataatgtaaaaaaactgaccttctatgggaaataaagactcattttaaaatgactagcataacataatgttaagcaggtcaagacttgctctgtcagaccgaggtctttgcagtctaaattggttaaacaatattatgaactgttcaaattattgaatgattacaaggtgtgtacttcattagaaaagattataaaactgtaaaattcagtcactctccaagacccattctattgtattcttacacttaaactgtagcaacaatggctgctttatttttggtcaaacttttctgtcataatttgtaccatgaaactttaatatctcagcaatgttgttgatccaaattctagagattatgttaaaggctttttttaagaaaagattttttacctgtggcactttaaaaaatattcttaatatgaataattgggatgatacaatttttgaaagatacctacaaggtcaccaaggttttaaaacatctccctactgaatgtctaggttttgtttttttactttaactttatttataatgtggctctaaggatcaggcccacagctctgggcttcctaaacacacaatctatatttagcaatatccccagttttaaaagatgagtgattttccactttatgttattttattaatatttttactcagtatgcaaattgtttccacatgtcatccatatgtatgtgccattatttagtttcagtacttaaaacagtaatttaaatcagtagaagagcactttccagacttaaaacaagtattgaaaaattattataccatagggcaaatcactcaagtatttataatatttcattttgttgaacttttttattattctctatagtaaaaacatagaaatccttctaccatgttccatgagccactcagaaagtggtagagatgattcatttaggggtgagcactcaaagtcatttactctaaaagaaatggttatttatgagtgaccatattaacctttgcccattacaagatgaagattctctagccgaggttgagagcagcactatctatgggcataaacaaacgtatttgggaagtaatttgacagcatggcatttagcaaagcaacagttctaactccctcattagtacctatgaattccctggccataggcttaggaccagtcttaacagtgataggcatgaatccatcttgtgaagcaggcttcagatacaatcaaagaccagttggttaccctcataataatcagccctgtgattattgcaccagtaggtacattgtcctggtaggttggtcacaagtgatttaggccattgatcactttcttcactagcagcttacaaaagcactttctgggactataaatgctaagcaaaagggaggaagcttctaggtcagtcccgcctcgatttctctattttctgtaaccgaagactgcaatctcttcagcaacagggtcctatcatccacttctaatgagcaagcaaaggcgatggctatagctcctactgttttatgggcctgccactggggcctctatgagcaacgactcctaggaaagaaataacataaaaggagttctgaaaaccttgtttcctggatatgactctgctatagccaagtcacaatggctatggttagttacacaagatggagcccatgatatttaatgacatatggtaggaggtccaccctcacccaagggggccatcagcatgcacttaagtgccactgtggtaaagcaggtatttcattcaatgctgaagccacttgtcagttgtccatgctccagtaaccatcctccacaaaatgccgtgttcatggaaacagctttaattacactcagtctgtgaccttccaacaaagagacatgaaactaggaaagaatgtattaggaataagaagttcattgggtgtgggcgaacaggatgataaaaaatgatcaacacacataatggacacgagtgagattgccagaaaataaattaaaaaatacaaagaaaaaaaaaaaaacccctgaagaatctacccagctttgtgactcatgcctgtaatcccagcaccaggaaaatgaggcagggtgataaaagaccaggttagactataaagtggattacaggccgttaggttacagagcaagactgtgtctcacaaataaaaagaaacaaagatagaattatgagtaattaaagtgtgacatgaaaatgattttcacattatgtttgggccacagaagacttatattaagagcttatttcaacttaatataagtaattggtgcattaatagtgggcatacaatcagagagccaagagccgaaatacgactaaggcagaggcagaagtgcccctgagaatttggccacataagcagatgaacctattctttatcctggtgactcgacaattgctttgctttatctatctatctatctatctatctatctatctatctatctatctatctatctatctatctatctatctacctatctacctatctatctatttatttaggcctctcttttgttgttatggtcctttgcttgctctaagcttcacttcccagaattcaactctagatgactttgagttcatgtttccttgacttttctgactcattctcagcccaatttagtgttgctcagaaagagttcctgattttctcagctaactaagctaagagtcacgtggcctatgtagagttttctgtgtgcaagcgaccattgaggacagtattttaaaggagtagagggctatatagggctctagtatttatagacttcagaagtgatggaattgaagccaagaaaagtcaagaaatcgcattcagaaatagggttcagaaccctaaatattctaagtggaaagataccatcaaggaatgtccatgactgagaagctaagactccaagacagaaatacttccttctcttgcttagatcagtttaatcttggctccatctttagcaattgtacttggccatgaatgaactcactccctttcttccaaaattttggtagtataaagcagtggttctcagcctgccaaatgctgcaaccccttagcacagttcctcatgtggcgatgactcccaactctaaaattctttctattgctacttaataattgtaattttgctactattatgaatcatagtgtaagtatctatgtttttcatagtcttaggtgacctctgtaaaactgtcattctaatcccaaaaggatttccacctacagggtgagaaccactgatgtaaaggctgcttactagtgtagtattttttcaacacatacttattctctatgtaggaaccctgaaaactgactacagatatagatagctttgagatggagcctgtagatgtagctttcctttcttagctctaggtttatttatctacagaagaaattcttctaaaaggtcttcattcaattaaaatttagtaggacattctcagattccttaagcatattagctaagcgaagttctgtgaattgctcagtggtaaggtttcctttgatttggcaatgacacgtatgttaagagttgggccaggaagataatggcattgccctttcgtttagtccgtgatgagtaggtgaccaaagggaaataatggattataaatccatttagttattaatattcaattgaaaagttacagagtgcagtatgggaagcattttggtccaagatgtcagacagaagcattctctttatgattttagcgaatcggtagagaaaataaataaataaataaataaataaataaataaataaataagacacaggaggtaactcgctggacattgctgtatgtgttcactattcagtctttgccccgtagctgatttcctctctgccttccttttggcagaacagtataaggggggagcgacagcggaagggtttagattgtctgcagccagccacatgcagaaaagctgctgagtaatgcgagcagaggagggaggcgtggccctttctctgcagcccagttcacagcctcagccaggactctcagcctggagatttttggatcaccccaccttttataaacctcaaaatgatcttcgaacagaaggaagcatgaaataaatgcaccaggattctctttactcctctcaccaatatctcagtccttctttggagaccttcaagtttgaaattgtcataagcatctttattttctaaaacttgttcaatgatttctcgagttaaacaccgttcttcgcagccagcgctcaatggactcacaaaaccgtgaggctagttctgtgagttttcaaaacggcggtctcttttctgtgtcagatgaaagcaagattaccaccacggaaaatggttatagtgccgccgtccgtgcccgtgtcccggtactgcactcgcatgcagcttctgtaaagctgttgtataactttgcccttcagtaaggctgctccttttttccccataaattatggaagattaattcaatgttatattgatgacatttgttatcaatataacactgtataacaagatgtacatagcacatcatgatatgtgtctcatgtagatcctggctaaataaaatgctggtagttgagataaaatgtaattgtggtttgaaatcactttggtaagttggatggcttttaaatgtaaattttaggaaaataaaattttatgctgtggttagctatttaagaataacaaatagtagctgggcgtggtgatgcacgcctttaatcccagcacttaggaagcagaggcaggcgaatttctgagttcgaggccagcctggtctacagagtgagttccaggacagccagggctacacagagaaatcctgtaagagtaacaaatagcaccatggacaagctaacataacatgtagtagtcagctcttgggagctggttaatgtcttaggagtttgctttaaatagactttaactaaaatttacttattaaaaagttggagcagatccatagtgtgtattccctctctgggttacatacaagggtttgtaatgataataacatataatacattagttacattttataataaaattcctccattctgcttaatgaatgctacaagctgtggtaacctgaggaagacctcaaggtctggtgactgtttaaggagaactaaacactaaattcatacttgccacttcacatttggtaggaatattttttgtcatgtataaaattgaatggagaaatatccttcacttcttacaagcgcatatgctatgattcacagaaacatagaagggccagcctttctgctgtggcggctgtccagggctgcctcctgatccttagtggtatgacttaacgttttctttcttttctagagtttctttgtatacaaaatcaattgtcaaagtcaaaagtcaatttcgttgatagtaaaattaacaaggtggaagccctttgtggggattggaatgagaatggtcccagaggttcgtaagcttggtttccagttggtagactactgggaaggattaggaggtgtggccttgttgtaggatttgtgatctggggctgagatttgaggtttcaaaactctcattctctgtctgtctgtctgtctgtctgtctctctctttctctctctctctctctctctctctctctctatatatatatatatatatatatatatatatatatatatatatatatatatctgtctctctctgtctctctgtctctctctgtctctctctctccctcccttgctcccttcccctctttcttttctccctctgactccagcttgtaaatcaggatgtagctctcagctaccacttcagtgccttgcctgtctgcctgctgctaggctccctgccatgatgataagggactctgaaactgtaagcaagcccccaattaaaagcttccttttataagagttgccttgatcatggtgtctcttcacagcaatagaacagtgactaagacaaccactgaagtggaaatattcactgctaaagtctttgaatcccagattgcttaatgataagaaactgactagcaaggacagaaagctttaccaaccaggctcagagttggctttggagaccctatgtgaggtttctgctaaaattagaagccaggtttcagagtacagctttttaaaatattctctaatgcttctttaaattgtgttagaaactgaaatggccttccctttttcatttataattttgctaatctgaatcttctctttctttatctttgtcaattttaattttaaaaaggattatcccagtgttttattaattttatgtattgcttttaagcttctctctaattttcacactgattattattgtttcttgttagggcatatgatttgttcttacttttgtaagtgcttgatgtacaatattaggaaatgtgttcgattttttttattacttctttgagaactgcaaaataatgtggtttgaccatatttgactcctctcttggctctttgtaagtcaacaccatttcttttttttttacattatttttattacgtattttcctcaattacatttccaatgctatcccaaaaatcccccataccctccccctcactcccctacccacccattcccactttttggccctggcgttcccctgtactggggcatataaagtttgaatgtccaatgggcctctctttccagtgatggcctactaagccatcttttaattcatatgcagctagagtcaagagctccggggtactggttagttcataatgttgttgcacctacagggttgcagatctctttagctccttggatactttctctagttcctccactgggggccctatgatccatccaatagctgactgtgagcatccacttatgtgtttgctaggccccggcctagtctcacaagagacagctatatcaggatcctttcagcaaactcttgctagtgtatgcaatggtgtcagcgtttggaggctaattatgggatggatccctggcatctctatgatgcagtctctagatggtccatccttttgtctcagctccaaactttgtctctgtaactccttccatgggtgattgtttccaattctaagaaggggcaaagtgtccacactttggtcttcgttcttcttcagtttcatgtgttttacaaattgtctcttacatctcgggtatactaagtttctgggctaatatccacttatcagtgagtacatatcatttgagttcttttgtgattgtgttacctcactcaggatgatgccctccaggtccaaccatttgcctaggaattttatgaattcattctttttaatagctgagtagtactccattgtgtaaatgtaccacattttctgtatccattcctctgttgaggggcatctgggttctttccagcttctggctattataaataaggctgctatgaacatagtggagcatgtgtccttcttaccagttgggacatcttctggatatatgcccaggagaggtattgtgggatcctccggtagtactatgtccaattttctgaggaatcgccagactgatttccagagtggttgtacaagcttgcaatcccaccaacaatgaaggagtgttcctctttctccacatcctcgccagcatctgctgtcacctgaatttttgatcttagccattctgactggtgtgaagtggaatctcagggttgttttgatttgcatttctctgatgattaaggatgctgaacattttttcaggtgtttctcagccatttggtattcctcaggtgagaattctttgtttagctctgagccccatttttaatggggttatttgattttctggagtccaccttcttgagttctttatatatattggatattagtcccctatccaatttgggatagataaagatcatttcccaatctgttggtggcctttttatcttattgacggtgtcttttgccttgcagaagctttgcagtttcatgaggtcccatttgtcaattctcgatcttacagcacaagccattgctggtctattcaagaatttttctcctgtgcccatatcttcgaggcttttccccactttctcctctataagtttcagtgtctctggttttatgtggagttccttgatccacttagatttgaccttcatacaaggaaataggaatggatcaattcgcattcttctacataattaccacccattgtgccagcaccatttgttgaaaatgctgtctttcttccactagatggttttagctcccttgtcgaagatcaagtgaccataggtgtgtgggttcatttctgggtcttcaattctgttccattggtctacttgtctgtcactataccagtaccatgcggtttttatcacaatttcgctgtaataaagctttaggtcaggcatggtgattccaccagaggttcttttatccttaagaagagtttttgctatcctaggttttttgttattccagatgaacttgcagattgctctttctaattcgttgaagaattgagttggaattttgatggggattgcattgaatttgtagattgcttttggcaagatagccatttttacaatgttgatcctgccaatccatgagcatgggagttctttccatcttctgagatctttaatttctttcttcagagacttgaagttcttatcacacagatctttcacttccttagttagagtcatgccaagatattttatattatttgtgactattgagaagggttcaacaccacttctttatccatgtaactttgtacccattgtctttttagccttgcaaagccttttgatgtgttgtcttctactggagagtactcacctaaggagaggttacactatactcgcagctaacaattgtcaatcactccagagtttggctaggattgtgcccaactcccttctccctgctgggatttggtctggctatatacagtatatatacctgtatactccgccgaaaaagaactgagttcctatgtgtagcgcctctgcagtgttcagatgataatgcttcgtgtggtcggcatccaccaccacagactcttctgtgttcatccctaagccttgaggggtgggggttacagtaattatgttccctttgggctgagaattctgcaggttcttcatctctataccttagccagttgtgactcactgtggagaaatctttctgagctttgggtttttgtttttttattttttggttttttggtttttttggttttttcgagacagggtttctctgtatagccctggctgtcctggaactcactttgtagaccaggccggcctcgaactcagaaatctgcctgcctctgcctcccgagtgctgggattaaagccgtgcgccaccatgcccagctctttctgagtttttaatataaccactcagagctacaaactttccttctagaactgctttttctattccaaagattctcttagggtgtgtttttacttgtgattccagccatttttaagcttcctctctgactccctcactgtccaacttgttattcaaaagtatcctttttagaggctgtcaataaagtctaagaggcaagagaacctgtgttcatatccacagcactaaataatatggctaaaggggcagcacatgcctgtaactgaagctttgcagaggcagagaaagggaaatgctgggaatgtgctggcccgtccaatctagccaaatcaacaagccacaggtttagtaagagacttgtcttaaaaactgagcaagagactaagaaagagcccctggcacacatactttgacctctagcctccacatgaatggacttacacatccacatgcaagtgtacacacacatacacttgaacatatgcacacatatataccacacacatacaaaagagtataatgtatttctgtattttctgtagtttctcatactgttgatttctcattttcctcctctgtgatctgacgtgacgtaaggaattattttgattcttttatattggttaagacttgctttgccatgtagcatgttacctattaaaggaagcttccataggcggctgagaacaatgtgtatcttttataaacacatatgttggattgaatattctctatatatcctttaagtcattttgtcctatttatattttaaatttctttattgaccttcagcttgagtaatgcatctaaaaattattgtatgatattgtaattatcaactattattatttgagtgtatctgaaattttgtctccattagtgttttatgaaattaagaattctaaaatttgatgtgtatctacggttgttttgtctcttccccttcctcctcctcctcctcctcctcctcctcctcctcttctccttcttctccttcttctcctccttctccttcttcttcttcttctccttcctcctccttctcctcctttttctcctcctccatctctttttcctttttgaggcagtctttccatgtagctctgttttggaactattaatgagactggcctcaaaatcacagagattggcctcttctgtctaccgtgtgctaggtgtgtgacaccatgcctgcctcaattaatataccatcttaattagttgtccctttcattgctcacttggccttctttatgtcttctgtctaatttgttttaatgtctaccttattaaatgtaggacagctaaattcttttcagatttcactcacttgttagattgtctcattctccaacagtggctgactttacccataaggtgtggtttttggagatagtaacagggtcaatgtttttattgtggttgttgttgttaatttgtcttcatacaggcatctaggtggccaatctgtgttaattagtgagttctggctatatacatataatgttattcttcttgagagatgtttactaattcctataattttgttacttgtttctttttttagttggtgtaaaattgctttgttattgtctgttctcttagtgggtttttgttgtttcagtaatattccttcttctccttcattaaatcatttgtcgtgtggttttccaatggcttgtttgttttcttttggtttcttcatttaaaaacaaaaacaaaaaaaacccctaaaaactcaattttccttctgaatctttctttcatgttgctgacattttctgtgtaccttagagttttgctcatcagtcccactgtcatattcttctgtgttgttgactttcctccgcaaatacaagagtgaattcatctgcttgtttgtatcctctcggaattcattgatcaaataaacttgtgaagtcttcatctagatgttaacaaatctccatgtcttttgagaagccgagaattatgaccttttgggggaaatactgtttcctttgacacattcttgagtttctctgctacacttcttatacctttgggttttgtcccatctcttgaagttttatttgagtatttcatattgaatacctcagtcatttttttctccttttcctcttttgtttctgtgtgtttggagacatctcacaaggaggctggctgcaaacttactatgtagcaaagtgtgacctgaaagcccgatcctcctgcctcagccccctcggttctacaactacagttatgttccaccacacggggctaagctcctgcctcagccccctcggttctacaaccacagttatgttccaccacatggggctaagcagcttactctggagagtttggtcaccagttccagttagagtggagagagcaaactgctctaacagcaccaacatcaaaccattcaagatctagtcatactctttagttgaggtaaatgtggatgcagtaagtgaaagagataaggaaggagacagaaaagggagtagagatgtgaagaccacttaaagaggaaaaaacgaaccaagtggagatgaatatcataaagaagaataggacagggtaagaagttagaaaaaaaattttttttaaaaattccagttaaaataataaaaggtaagatcagaatacttctaaaaggataaggaataagaagaagcactctaaaaaggaaaaaaaaatcaagattacccaataatgaaaaatatgcataaacaaaatgagataattaaatgatgagaataaaagacaaattttaagactacaataaaagtgcctctaacagcttaacaatgacaagagggaaagtgaagaatccccagagttaaaaagaaggggtgtgtgtgcgaagtgctggaatggattccttctaggtcctagaaaattggagattaccagttacatgacatggtggggatcatagccctttaaactgtgggctgatgtcttgcctgtagtttaagtttcctgatgctctgttggacactctctgctggttaccagagttgttttcagattggtggcttccctttgtatatcagagtacacaggttttaagtctgtgtgctgggaaaatgctgtcaccccactgagacaatccagattgcatcccctgagatagccaatgtcttagctgtgaggtatctcccaagtgcactgggcatgtgctaagtgaccatagaagacattttctagatagatggagagcctgtcttcatgcatgcaagaacttctaagtttatcaatgagcctactagtagaatatagctctgtatttcatggctggaacttgagttctcaggctctgtggccatcaggcaaagaaatggttcatgctgctcatctacccactgatttcagactcagttctccatacaaggtttgctctcagttgatgagaactattcccagatactaatggtagggctttctttccttatgcacttacttcctgcctaaactgagctcccttccaactgaacctgtagtttatcagcagcgggcatcctgctctccatgggacatcttgtccttcctgggcctcttctactctaggtctgtggcaggccaaatccagactctcagggttatggtttttcccccgcgctttctttccctgtttatctcaggattctgttgttgtttttaatcccttcaaataagtaaataaataaataaaatttattcattgaaaatgatgtaggtgaatactgcatttgcatagttccccttccttctcatctttctaactcctcccatgttgtgctctcctaagttctccttcccaaattcgtagccttccattcttagctcaatttttagcaatagactttcaagatctttcagagcctacactctggttcccatagagtgactaaataggaattttcactgccacagacctgtgcaatggaagaccactgtctcaccaagaactgagatggacttgaaacctgtgagtgctgtgagactgtccttggggtcagtgcccaagtctcttgcctggcttagcttttgaaacggcttctgcttctttcatcttcaccatggagtcatgaaaatggaattatttggttgtatcttttaagcctgtcaccttctctgacctgtcattattctttgtgttgccttttcgatttccaaaccgtttcactccactcttcttcagattgatccccctattctgactcctttctgtttttctgtttttcttttctattagattgtgcctggggaatgtctgatccatgtttaatgacagagctcttacttataggcattcatctccattatgtctggagcagagagaaatctgcatttccaacgtggacaacaagacttccatgtggacaaaaaaaaaaaaaaggcacagacccataaactcactgtgaacattttgccccttgtaaccatccccccatccccttcctcctcctcctccttttccccttcctcctctttcttcacccttttcttcttcatcttctcctccagaaacacagagtaattttatttttattacatcaataataataactgcccattctccaaagagaacttattctaagagaaatcatcctcttagaaaaaaatcaaactatggaataaattatacctgtttactaggttattatactttctccatcgtttatgaaaatcaattgcccctgttataacatttctcataatctacaacagctctacttctgagggcttcatatttcaagttaaattatggagtcaaagagctttcttatgctctatcatgtcatacttattgttctttctttgatggcaagtagttcctactgtgtacatttaaagcatcaatatgatcttattggatacgtacagaatggtaaaattgttcactgtcatgaaacagataaatgtgtctatcagtttatataggtactttttttgacaaggccagctaagtactctttataaaatcttgactatgacaccattccattaactattgtcctcatgttacacatttgctctcacacttgccgccctatatatcccctactttacatcttttaacttacatctcatttcatttctccaaactcatgttttcaatgtagcattccctgacacatgataatcctataagaacagaaccgttaaaatgagtttgaattaacatttcacagacaatcctgtgttcttcccctttcaaaaccagaccaaccaaaccaaatctcctatatcctcagacccgaattagtcatggcaaacattgatacaaaaaatagagctcccaccttttgaagatttgggtgagatacacttcccaacctcaagcatttgaacgattagtctccacttggggacctcggggagtcataagaggtatggccttcctggataagtatgttcctgggactgggctttgagagcttcttatttgtttgttttgttttgccaaaagcaagcaagcaaacaaaaaatgcttgtcattcctgcttgttgctcaagatgtgagcgctcagttacttcttcatctcccttgttttcattccaccatcttggactctaattctctggaaccataaactagaataaactcccttttctgtaactctccttggtcacagtgttttatcacagcagcagaaaagcaactaatataccattcaaagggaataagagattgtttactttggagccaaatttgagtggccatggcttacaaacagggtactaagttaccctaattccatgttccaatgtggatactgtttcaccaagttctataatagcagaaaagtaaaagtcatgaatcaaggtaattttaaaattcattggtgggtatatcagagaagcagactgcagccaggcagataggcctcagatgttatctgataactactgagctcttccgttagttgggaataaaattttgttaatacattacaaaggttttgctgttgtagtggtagtgattttgtttggttttttttgttgttgttgttgtttatttatttttttaaaatctgcttatcaacatgttaggactgatatagagttgagcaaggagtgtctccttaaggtagaaaaatggccccaaaggagtaggtgcagagacctagagtaaaacattgtgttgagagagaggttaaattggaggtctccattggatctctctcttcaaagctaggagaacccctcagaactagaagaagtgggtaaagatggtaggagtcagagaggataaacattggctcatggagtcaactaagcagggctcacaggggctcagagagactaaaatggcatgatatttgggtaggtccttactgggtcctctgcttatgtgttatggctgtgagtttggtgtctttgtggtacctcctaatggtgggagtgcgtatgtttctgactctttcacctgctcttggggatcttttcttcctattgggctgccctttccagcctccataggcgggcttttgccttgtcttattgtatcttgctttgtcccattcttctgtactctcttgaaggccagttcttttctgaagaagaaatgcagggggagtggatatgcaggggagaagatgtagggaggagatgggaagagtgaagggaggatatattgtggtaaggatgttttaagaatctactctccaaaaaaaaaaaaaaaaaaaaaaaaagatagctccaaggaaacttgaagtaagcttcctggttcagcaacatcccttaccctccacagtttttaaagttttagtcagcctcacaacctttgcacatacagctgcttcacaggaattttctttaacaaaaaaaaaattagatattgagaagaaatcagtcatcagtctttttaaatttctttaaattaatttacggtgatgcatgagcagctcatgtatgcctcagacatatgtgtgtatttcaaatggcaatttatattaagctgaagggctaaagtgagttaactggatttcaggcaagttgcagagagattttagaatggtagactttcctcagatgtaagcgtgccagacttgtcaaagaaattagcaagctgtccaggtaaaagtgaatttcgaataaacaataattaactatcagtatagctagatgtcctgctatttattctgaagtacaaaaatagtgttgtttattacaaatacaaacgtaactgcatttttttctggcaacccatttggatgtcttttgaatttcttacacttccctctccctctccctctccctctccctctccctctccctctccctctccctctccctctccctctccctctccctctccctctccctctccctctccctctccctctccctctccccctctctctctccctccccccccccccctgtgtgtgtgtgtgttgtgcagaggtcagaggacaactggctggtagaagagggttctcttcttcactcattggtctccagggctggaaatcagatttgacagcaagtatcctttatataccaaaccatcttgcctaccttctatgaggatttcttaagtcattgtggtcatttatactctcatggactcactgacataaaactcccctttggttttggtgatttatatttttcaatctccattctggaagttgagttccagatgaagtgctgttgttgaggtctcacttttcttccacccaggagtctatgaagaaaggagcagaaatttccacaaatgggcactgctacagtagactaactgtgcgtgctttctaaactaaaaccaataatgccccacctagcttagttgcttcagaattcacttattgtgttgagattagagatggtagcataattttgagatttaagtagaaggaaaaataatttgggtgtttttgttgaatgttataataacattaaaattatttacaatgtttcaggaccacatacaattatactttgtcagctgccacctgctgttgagcataacaaaaacgttatttttttcatagttaagaaatgttgagctgggcgtggtggcacacgcctttaatcccagcactcaggaggcagaggcaggcggatttctgagttcaaggccagcatggtctacaaagtgagttccaggacagccagggctgtacagagaaaacctgtcttgaaaacacaaaaagcaaaaaacaaaacaaacaaaaaagaaatgttagcaatagtgtctgagtttgaagactgcatctgggatggattcctaagtgtggcagtctctggatggtctttccttcagtctctgtttcactctatgtccctgtatttcctttagacaagagaaaatctaggttaaaatgtttgagatgggtaggtagccacatccttaaatgggggccatgcctaacctcagatgtgttctctacaggttgtctctcccctctgttgggtatttcatctaatttcatccccatagagtcctgggagcctcttgctttcctggcatctgggactttgtggtggatatccccagttccccatcccccattgctacacacctctgttcaaactcctgacctgtcatctgaactacatctcccctgtctcctcccattttggatcctgcctcctttttcctcttcccccttctctcctcctcccaagtccctcccaccctctaccttcagtgattattttgttcccccttctaagtaggactgaagcatccacactttggtcttcctccttcttgagtttcctgtggtctgtgagttgtatcttgagtattctgagctttattcctaatatccacttatcagtgagtgcatacaatgtgtgttcttttatgactgggttacctcactcaggatgatatactctagatccatccatttgcctaagaatttcatgaagtccttgtttttaatagctgagtagtactccattgtgtaaatgtaaccacattttctatattgctgatgccaatgaagtgcttgctgacaggagcctgatatagctgtctcctgagaggttctgacagaacctgaccaatacagatgtagatgcttgtagccaaccattggattgagcattgggaccacaatagaggagttaagggatgaaccgaaggagcttaatgagtttgcaactccataggaagaacaaaaatattaaccagccagacccccagagctcccaaagactaaaacaccaaccatggttggacccatggctttagccacatatgtagcagaggatgaccttattgggcatcaggaggaggggaggcccttggtcctatgaaggcccaatgccacagtgtagggaaatgctaggacagtgaggcaggagtgggtgggtgagcaccctcatagcagcagggggaaagaagatagaatggaggtttcctgaggggaaaccaggaaaggggataacatttgaaatgtaaataaataaaataaccaataaaaaaatagccaaaaaatgttagaagacatgctgagtaggagaaaaggcatagattcagaaaccaaatctctcatatgtatattaatagtactattttatagtttttcaccatttgatctatgagaaaaaggaacataacttcaaaactagttagaactaaagagtgtaggatattccttgaacttaatgttctgttatctgacatgtttatggttttgagcttaatgcatcaaaagttctttaattgaaataagaattaaaatgtgaatctattgttagaaaaaaaaccactttatgtgagatttattaagagaggttacatgatgtttattcttttacctttaaataaattagtaataattcaggatagtgttactgctccttgccttttcacagatgcataggcagacagacagacacagacacacacacacacagacacacacacacacacacacacacacacacacacacacacacacacacatacaaacagactcaagaagtcaaaagaggttttctgtattttaagttgatgccaaaaatgtttaaccttcattttcacctattctgggactaatacatcactccattaaggtcagaaacatcaaaattccaaaacaaatcaaaatctcagagctgatttcataaagaatcttgtgaagaaaattgctttagtctcaagatcccaatactatgttattttccactccccctgccaccgtacggtcttcactgtcctgcagggtcttgtctgtagcatatattaaagaatactttcaaaatgaacaaaactgattgtacatattgtgtgtcatacatcaagacaagaatagatttggctctgtgtcctagctgctgtgacagatgtcctggcatctggtagtgtgtcctttgtacagagctgacagtcattagctggtgaccacacagaaagctaagaatcccagaagggtctctataaatcagtccagtacatcacaaaagaaacactggttgactgactttaactgtcagattgaaagctaaccagtatagttttgaataataaattagatgtaatttgatatcatatatgataaatgctgcatagaggcaattaaaatagtgagtctttattttatttttaagtgaactaattttttatcatattcagcacaatatatatttttataccaatcataaaatgatcgacatgttattaaatgaacataaataaagtcattttgtttacttgtttgttttgtttttagtagagctttaaaatcttgactcttactgtggtacaaacccaaaataagaacaatttttagatattggagttcattgtaattagtctgtacttcaatgtccctcacatcaccaaaggattttacctccatagtagttaagctaagagttgacagttctgctgcaccaaggaatgaattgcaggcacgattatttggatacatatttccttctataatcaaaactatttgacttgagtgattgtcatcattctcagcctacagggagcaggttacattcatttaagaaatggtgtgtattaagatggtctatccatggagtcattcatcaattgtttcaatgaacaatggctctgcttggagggtggcacagacattaggtgagtgtaagattctggttcctttgactgtgataattctgaaaaacattcatatcagaaaaaaagtaacttataaggtcctcttcttcaaaattgatacaataattataaatatcaaaaaaaagttcagtctcactctttgttgttctcttacaagctacctcccaaattaattttctatatttctttgggctgtatacatgattttgaaatatgtaagctgttctgaaaaccatagagtagtgtaaaaacattaaataaacaatcctacaaatagatatgctgagataggagaagcatgatttcaagaccattgtgtggtacacagctagactttgtcatatacaaacaagcagaaagtgtatatggattgtataatattggacctatttctcccattaccaaattagagagaccactggaagacagccgacaaatttctaattcctcatatatttgaatttcaattcattaagatatgttggtaatattaattttcatattaagagatattaaggaaaagtgattgttaattcctgttatttttgttgttaaaggtggaattatgtttgtgtccgtttgttgaaagattactttcttgctttttctagggtgtagtttcactccttgtgttggtgttttccatctattatcttttctagggctggatttgtggaaaggtattgtgtaaatttggttttgtcatggaatatcttcgtttcttcatctatggtaattgagagttttgctgggtatagtagcctgggttgacatttgtgttctcttagagtctgaatgacatctgcccaggatcttctagctttcatagtctctggtgagaagacttctgtaattctgatagctctgcctttatatgttacttgacctttttcccttactgcttttaaaattctttctttgtttagtgcatttggtgttttgattatgtgactggaggaaattcttttctggtccagtctatttggagttctgtaggcttcttgtatgtttgtgggcatctctttctttagggaatttttcttctataattttgttgaagatatttactggctctttaagttggaacacgtcactctctgctatacctattatccttaaatttggtcttctcattgtgtccttgatttcctggatgttttggattagctttttgctttttgtcttttctttgattgttgtgtcaatgttttctatggtatcttctgcacctgagattctctcttctatctcttgtattcagttggtgatgcttgcatctatgactccttatctctttcctaggttttcaatctccagagctgtctccctttgtgatttctttattgtttttagatcctggagggtttgtttgtttctttcacctgttcaattgtgttttcctgtaattctttaagggatttttgtgtttcctctttacggacttctacctgcttaactgtatttctttaagtgagttatttatgtccttcttaaagtcttctatcatcatcatgagaagtgattttaggtctgaatcttgcttttccggtgtgatggtgtatccaaacttgctatggtgggagaattgggttctgatgatgccaagtaaatttggtttctgttgcttatgttcttatgcttgcctcccaccatctgattatctctagtgctacctgatatatctggctatatctgactggagctcatccttcctgtgatactggttgtgtcagaactcctcagaatcaagctgtctctgtgatcctgtggttctgggatcctgaatgggtcagagctcctgggagttaagctgcctctgggaccctgagatcctggtgtgaccaagcttctgtgatcctgtgatcctcggcatgttagagcacttgggagtggagcttcctctgggtgttgtgggactggctgtgaagttcaagcccaaggtctgctcagggcactgacccagacagaccagaaggaacttgtgccactgatctggtggagttcctgtgtgcctgggtcccattggtcctagttaattcctgtgttttgacagatgttgtgtcctcctcacctctgatcctatgatcctgtgaggttttaaatcaagaaattatgtcatcttttgtgacttatttcctatacattctttcagcacactctgtccttaaatgattcttctttgaacatgagtctatggtattacaatagaattgtgtcattgaccaaacttgtgaagggtacagattttatatgtagaatgtttatcaatcaacttaatgcaggccacccacacactgctggtctcaggctttcttaactcagagcagttactgtgtttctagatcatccagatgagaggaagtgtggaacaccagagagccattttccaggtagctgatctgtgtttaatactcttctctctcatgtcttgtcagcctctttatgtctgccttggctatttgctgtttctctgtagctgtccctgtgttctgtgtgctaaactccttactccatcaactatatcttgaacacttttgctttgagatgagctggttttgtaagaaaatattaggataagaaggacaccttcaaattagctttatgctaaagagacatcaacattctcaaaaagaattctacactttttgggatatttcatgtgtcgcatattttaaacatctttcttgctttagcaagtcaaagacttctcttggaccatttttcatcctgtgttgtccaggcaatatgcacacgaatgaacagtgaaagtcactgaaaacgtaaaataactctgagcaattgagactaaatgcctctgtatagagaaaagactgccacagacaggaatgttcttggtgtctcttgggtgcactgttccatcataccatgtgtcccatatagtgctttcatatagattgtaaatactgcattattttaaggaaatcatagttaattaaggtaagtatttccaaaatggggttataacaatttactccaacatcacatgttaatatgatctgagggaattatgcatagtgtttgccttttgtttttgtttatttttccattactgtttcatagcaatgaagagacaaatgctgactctagcagaatttcctcagtctgctaagtatagctacataattgccaccttcaccagcaccattgggaaaaaaataacctacattacttgactccatatagctatattgccataactttgtagggcttacagtaatgtggtttctgtataaaactgaattgaaatctcagaattctacagagagaggaatggggacaagaaaatgaggagggaactgaagtggcttgtgtcaaagccttcttttaggaagtgtgcacttaacttctagtcagtaagctatagcagccatgttagattttctgttctcactaggccagctccttcttgatatcttaaatgctgcagcatagacacatggatggacaatgacagttctagcaaatatcattgactggaccatttcctcaccatggtacggttgtctttttagtagaagaattttttactacttaacttaaataattggcttctgattgataatacatattctttgttgtgtgtttttgtatgtatccctgtttgggagtgtgtgcttgtgcctatgcatgtatgtgctcatgagtgtagacatgtatatacccaggagtgtggagtgtttgtgtatgagcatgtgtgtgtgttcttgtgcatagagagaccagagataaatatcacacttctttctctgttgctttctaccttagtttttgtgacatgatctctcactgaacctaaaattcttgattcagctggactgtcagggcagtaggcccacatgatgcccctgtctctgctcctccagcactggaattctaggcattggatgatgctgcagctttttcaatgggtactgaagatctgaacatagatatccatgcttacatggcaactgctttactaatgaactactccccagcccactctttgtattcttgatataggctatttagcatcctttgaacaaattttcctgagttgctatatgattgttagaaggccatgatttcactgattgcctaatgataatgtgttcctcatctagaactataggtggagactcatgaggtgtggaatatctaatctctggcaacatttgtgtctgagagacaaatattcctaattaattcaactcatttagcagcctggtctttgatcaatggcatacacttgctcgttagtaatatcactgtcaaacatcactgataaatcgttacttttagaccctttgagtcctattagctttctcttgacatccagtgaatgtgtcttcttattccaggatccagactgaggaagaagcacccatttgagatataccattctcagagcaaaggacctagagcatgaggctatgtagacacacagtgcttcagagaaagcttgactagagtttataagtctcattccatcagcacaaaagtctattactcaaaattatacaagggcaagaagagcatagcaggatttccactggttggggaggcctgcaggttaaacacccaggtgaataattctcctccaactaagtggatatttgggtatcagccccgactgaatatcaagaagtgccacttcacctcatcaaacccgtcttggcctctctgtctttttagtgaatgcccattgtaaatttactaatgcatttgcgattgtacgagagatagttatatcatgttaggcatatttacaaccttgttattgtttcatgtgaacatgagatattatttgtgtcaagttgacaaggggtggattgtagtggctattcctggttgtcaacttgacaatatttggaatgaactacaatccggaattggaaggctcaccagtgacccttatttggaggcttggagatccttatctggatcttggtttgaagatcttgagccatagtggcaatggattccagaagattgaatctccgagtttaaggaacacacctttaatctgggctacacctttcatctgggtgtattgccctgttagactgtgtcatcctgtttatgaccctgcaatctccttaccaacctaaagactctcactgctcatccatatcattctctcccctacaccagaatatttggcatcatatttgagatacatttaagacactttcaagagagaagagggcatttatcattaaactgaaacttcaagcaagtaaagactacataatagaaataacacagaaaaaatacatatatacatccacaaataaaaacagagcttatacaaatgtatatttctcaaaaattgatagtatataaagaatttcctaatggtttttaggctcttgatctgagaacatatcagcactttattctgtcaaaatagcttttgaggatgggtatgatggtgcacacctttaatctcagcactcaggaggcaaaggaaggccactgtgaattcaaggccagcctgatctggacaatgaattccaggacagtcagggttaggaaaagagatcctgacctaaaaaaaaaaaattttgttctctttcttttcttttttcttctttctttctttctttctttctttctttctttctttccttctttctttcttcctttctttcttttgatgttgttgttttagtttgttgtctacttttttattggatttttatgtatttacttttcaaatgttatccccttttctggtttcctctcccatccctactccctccgcttctattagaatgttcccactaccaccttattgatctggcattcccctacactggaaaatcaagccttcacaggatcaagggcttctcctcctattgataccagacagtgccatcctctgctacatatgcagctagagccatggacctctccaagtatactctttggttggtggtttagttcctgggagctctggggcagggaggtctggttgattgatattgttgttctccctatggggttgcaagccccttcagctccttcagtcctttctccaactcctacgtcagagaccctgtgctaagtccaatggttggctgcaagcatcttctgtatttgtcaggctctggcagagcctctcaggggacagctataacaggcttctgtcagcaagtacttcttagcatctacaatagtgtttgggtttagtgtctgtctatgggttgggtccccaggtgaggcagtctctggatagcctttccttcagtctctgctccacactttgtccccgtatttcctttagacaagaaaacccttttgggttaagaattttgagatgagtgggtggtctcattccccccaatctttgctggcatctgggacttgctgatggatatccccaattccctatcccccattgctacacacctctgttcaaattcctgcccctctgtatatcatccccatctcctctcataactaatcctgcctccctttccccctcctcttcctctcttcctcccaagtcacccctaccctctacctcccatgaatattttgttcccccttctaagaagtactgaagcattcacactttcatcttccttcttcttgaacttcatgtgatctgtgaattgtatcttgggtattgggaacttttggtctaatatccacttaccagtgagtgcataccttgtggttcttttgtagctgggttacctcacttaggatgatatcctccagatccattcatttgcctaagaatttcatcaagtcattgtttttaattgctgagtagtactccattgtgtaaatgtaccaattttccattcatctgttgagggacatctgggttctttccagcttctggctattataagtaaggctgctataaacatagtggaacatgtgtctttgttatatgttgtagtatcttttgggtatatgcccaggagtggtatagctgggtcctcaggtagtcttatgtccaattttctgaggaaccaacagactgatttccagagtggttttaccagcttgcaatcccaccagcaatgaaagagtgttcctctttctccacatcctcaccagcatctgctgtaacctgagtttttggtcttagccattctcactggtgtgaggtggaatctcagggttgttttgatttgcatttccctgatgactaagaatgctgaacatttcttttcttttcttttcttttcttttcttttcttctcttctcttctcttctcttctcttctcttctcttttcttttcttttcttttctttttccttttggttttttgggacagggtttctctgtatcaccctggctgtcctggaactcactctgtagaccaggctggccttgacctcagaaatctgcctgcctctgcctcccaggtgctgggattaaaggcgtgcttctccacgcccggattgaacatttctttaggtgcttctctaccatttgggattcctcagttgagaattctttagctctgtacccgatttttaatagggttatttggttctctggagtctaacttctttttttttttttttttttttttttttttgtagtgctgagctttcttttttttttccatttttattaggtatttacctcatttacatttccaatgctataccaaaagtcccccatacccacccacccccactcccctacccacccactccccctttttggccctggcgttcccctgtactggggcatataaagtttgcgtgtccaatgggcctttctttccagtgatggccgactaggccatcttttgatacatatgcagctagagtcaagagctccggggtactggttagttcataatgttgttccacctatagggttgcagatccttttagctccttggatactttctctagctcctccattgggagccctgtgatccatccattagctgactatgagcatccacttctgtgtttgctaggccccggcatagtctcacaagagacagctacatctgggtcctttcgataaaatcttgctagtatatgcaatggtgttagcgtttggatgctgattatggggtggatccctggatatggcagtctctacatggtccatcctttcatctcagctccaaactttgtctttgtaactccttccatgtgtgttttgttcccaattctaaggaggggcatagtgtccacacttcagtcttcattcttcttgagtttcatgtgtttagcaaattgtatcttatatcttgggtatcctaggtttggggctaatatccacttatcagtgagtacatattgtgtgagttcctttgtgaatgtgttacctcactcaggatgatgccctccaggtccatccatttggctaggaatttcataaattcattctttttaatagctgagtagtactccattgtgtagatgtaccacattttctgtatccattcctctgttgaggggcatctgggttctttccagcttctggctattataaataaggctgctatgaacatagtggagcatgtgtccttcttaccagttggggcatcttctggatatatgcccaggagaggtattgctggatcctccagtagtactatgtccaattttctgaggaaccgccagactgatttccagagtggttgtacaagcctgcaatcccaccaacaatggaggagtgttcctctttctccacatccacgccagcatctgctgtcacctgaatttttgatcttagccattctgactggtgtgaggtggaatctcagggttgttttgatttgcatttccctgatgattaaagatgttgaacattttttcaggtgcttctctgccattcggtattcctcaggtgagaattctttgttcagttctgagccccattttttaatggggttatttgattttctgaagtccaccttcttgagttctttatatatgttggatattagtcccctatctgatttaggataggtaaagatcctttcccaatctgttggtggtctttttgtcttattgacggtgtcttttgccttgcagaaactttggagtttcattaggtcccatttgtcaattctcgatcttacagcacaagccattgctgttctgttcaggaatttttcccctgtgcccatatcttcaaggcttttccccactttctcctctataagtttcagtgtctctggttttatgtgaagttccttgatccacttagatttgaccttagtacaaggagataagtatggatcgattcgcattcttctacacgataacaaccagttgtgccagcaccaattgttgaaaatgctgtctttcttccactggatggttttagctcccttgtcgaagatcaagtgaccataggtgtgtgggttcatttctgggtcttcaattctattccattggtctacttgtctgtctctataccagtaccatgctgtttttatcacaattgctctgtagtaaagggagtctaacttcttgagttctttgtatgtattagataacagccctctattggatttaggattagtaaagatcttttcccaatttgttggttgccttttgtcctattaacagtgtcctttgccttagagaagttttgcgattttatgagatatcatttgtcaattgttgatcttagagcataagccattgatgttctgtttaagaaaatttcccctgtgtccatgtgttcaaggctcttccccactttctcttctattaactttagtgtatcttgttttaaatggaagtccttggtccacttggacttgtgttttgtacaaggagataagaacagatcaatgtgtattcttctacatgcttactgccagttgaaccagcaccatttgttgaaaatgcttttttccattggatggttttagctcctttgtcaaagatcaagtaaccataggtaggtgggtttcatttctggatcttcaattctattccattgatcttcctgcccatcactgtaccattactatgcagttttaaatcacaattgctctgcagtacagcttgagatcagggatggtgattccccccagaagttcttttattgtcgagaataattttcattattctgggtttttggttattccaaatgcatttgaaattgctctaactctatgaagaattgagtgggaattttatggggattccattgagtctgtagactgctttcagcaagatgtcccttgttactaaattaatgttgccaatcatgagcatgaaagatttttccatcttcttcaatttctttcttcagggatttaaagttttgccatacagatctttcacttgcttggttagtgtcacaccaacatattttatattacttgtaactattgtgaagggtgtcgtttccctaatttctttctcagcctgtttatcctttgagtagaggaaggctactgatttgtttgagttaattttataatccagccactttgttgaagttgtttatcgggtttaggagatctctggtagaattttagggatcacttaactatacgatcatatcatctgcaaatagtgatattttgacatcttccttttcaatttgtgtccctttggttttggtttttgattcaagaacaaagaatgcactaagtacaatgcaagccttatagaattagtcagtggttaagtgatcagggagatggctcagtgggcaaagacacttgttgactagagtttaatcctaggaatttacataaaattacaaagaaagaagcagctcttcaaagttgctctctgacctccagttttatgccccgcacaagtctccatatacacacttaatgcacttgtgcacacacaggcacacacacacacacatacacacacactaataaatattttagttatttttgtgagataatatcaataagaataatatttcacctgactttaatttttggcagtagaatattttgcaaagtagaccaaaaatttaattaagaagggtgctatctagaggactgatgtcctcaaaatagtggtaaggcttgcaggagctgaccatcatgttagcaagaatccagctaattttcactataaataccatgctattttagaagacactacacatatagcattgcttcacacataaaattatgtggcataatatagctaagatgtactgatattgaataaccatattaactgatagctgggattaccaggtttagaaaaacatttaaaagttatagaaataaagtatgaattgttggtgacgataaagtatgaattgttggtgacgataaagccagaaggttcctatttgaatgaagtaattcattcttatttctctttcatccctgtttttcccattgtgaattaaatttttattagttttaaatgttttcctcacttatttttttcaaaagatttactcattttatgtatgtgagtacatatgtggtattcacttcagacacaccagttcccattacagaggttataagacactatgtggttgctgggaattgaactcagaccctctagaagaacagtcagtgcgcttaacctctgagccatccctccagccctcaggtcctcacttctattccagtgtctttaggagattttactgtttcttgttgccttctttcgaatgacttgtctatatttaatttttaaaagtattttctaaaagaataattcatttttttcttggcaatttacttctttttattattttaagtatgtctgttaatgaaatgcatcatttttctttcttcataactatgtgagtttgcattttgaataagttcttatcttatatttttctttaaaatattactctctctttgacacttttcttaccacgatttgttggctatctctactgaagggtacacgggctgctctatgtaaccaaggcatccaaagtcacactaaagtaaagagaccgccacaagcctcaagccacatggtcctcaaatgagacatctctaatgaggcatgtgtttccacaaatggggaccattctcagttttcagtttaaatgtttaaaaattttaagttaaaaatccaaactttttctttctatcctaatggttatttctggatagagaaagtagaagttcaaactaaaatctatagatttttgcccataatattgcttgaaaacattaatattgaaggatatttgacagcttcagatatttcataagcaaccttatggaacaggtcatcatgcttaaaattacagttatttgtttacttagctagtatctgtgtgtgcgtgtgtgtacctgtgtgtttgtttaagagagagagacagagagagacagagagagggagggagatggaaaagtggcatggtggagcttagaggagaactcacaggaatcagtcatctccatccaccctgtggggcagacagcaagctcaaggtcaccaggcatgaacaggcacctttagcaaagccatctctttagccccagatcacaatcttgaaatggtattattcttataattaatataacttatgttttactttttggtagtatttgaatacaaggtctaatcagaaagtaagaaatactttccccctaacctgaatatgttatcagtatagtatttagttaaattactcacatatgagtgtaattactgtaactgaaccaggtcattattataacaataaatttgaagtggtcatattcatcagtagtatttgcctatctttttggctgtttgtttactcagttgatactgacagccaatagccctaaggttttttttttttttcattttttcttatactgctttttatttatatttaattatatttaatatttttcttttatagtcaagttgttatccccctcccattctgccctcagacagttcctcatcccatttctcctccccaccctcccacccccatctctaaggggtctccacaccccacactccccccaacacccctgccaggtctctccattccctgcagccccaggtctctcaagagctaggggctcttttctcactgaggccagaccaggaagtcctacttgtacatgtgtccaggaccttggatgagctagtatatgctgcctggttggtggctcagtgtctgagagatctcaagagcctaggcttattgagcctgctggtcttcctatggggtcgccctcctcctcaacttctcccagccttttcctaattcaaccacaggggtccctgacttcagacaattggttgggtgtaagtttctgcttctgtctcagtcagctgctttttgggcctctctgagggtagacatgctaggctcctggctgtaagcacaccataatactgttaggtcttgtgggttgctcatttttactgaataggaaggcttgaagtagccacttctgttctgtccacacaattttatgaaaaatggaccctgttgttgcaccctttcagaaagactgaaattgtatgcaattagtatgtatttaaattatgctgcaatccaaaatttaaatatttgcatacaaaagataatgctaaacctatgaaacagcaaagaaatacaaacgagaaaaaacaaacaaacaaatgcccttatatatgtgtttacgtttgttctcagtaaagagagagagagagagagagagagacagagagagagagagagagagagagagagagagagagagagagagagagagagagagagagagaagcaaagatctatgtgctcggcaggattatcaagcactgcacactggtgccttggtcacagacagattgcaactcaaagctggctccatgagtggagcttagaagtcccaatacttattcatgtatccatcctaaactcatggcacaacacaggacatgtgaggtaatggtggcatccacagacatcttctgctgccagtcccatagatcatggcagcctttcaattatgcttgtatcataacactcgatgatgataacagcagctctgtcaagagtttgtggattttctataatattctttttaatcatattttagagtatatttctactaataaagatgtttaaggtaataaaagagcaggccacactgtgctgatagcagcttcatacgtctcgtgaatattggactctttgatgcattaatgttgagtgatttgtctatactacgtaagtccatttaagtattctattatgtttccacattaaaatcatctactgatttttttctcaatatatactcatgcttttaagtgacataaggctgtaaatagttcagttcacttccaaatatcagatcataagtattatctacacatcaaataagtagaatcagcactagaattgatagaataaaatcagagatggtggtgcaagaccacaatccaaacaattaggaaagtataacatgataattgcaatttcaaagccagtatgagccatggagcaagttccactccacctttggtgcatgctgagatccaaactcaacagtcataaacaaaccaaaagatagggtttatagaataagagaaaaaaaaggagaagaacaaataaacacactaagatagaattcaatgcacatttagactcaaaaccatcaagtaggtgagagggatacctagacaggatgatctgaatgaatgagtgagataaaatacagtgattccattgcattgagagggagcccacctctggcactattaattacatactgctgttcttgcagacaggaggctagcataacattcatttgagtggcttcatgcagcagctaatgaaaatacatgcagaatcccacagccaaacattaggtaaaccttggaatcttgtcaaagagggagaggaagagccagggagatccagaacacaagagatcctacagaatcaactaacctggtcgcatagcaactcacagatactgaaccaccaacaagacatcatgcatgggatgacccgctattcatatgtaagagcttaacagcttggtcctcatgtgagatctctatcagcaagagcaggggctctctcagactctattggttgactttggatcccttccccctaattggacagctttgtctagtgtcaatagaagaagatatgtctagtcttatacatcttaatatgccaaggttgggggaggagggttgatatcaatgggaggtttcactttctctgagaagaaatggaaaggtgaatggggggagggagaacactgggaggagaggaagaggaagctgtagttttctattagagacctagacatcaaagctgcaactaattgtattgagcttgctgactttaatgagctaacagactattaaaacagagtctgtaccaggcagaacttgagctctgggaagtttgggcacagatatatgtgtgaaatttgagttcttattaagtatacctttaaaaggatgcatcttggatttggccttaatatctgcaggactgcagactctcccatgtatcagaattgtttcggtgaagaaaagtacattgttccttgaactaagaacatttctactacctcctgtgcacatagcttcctttccagtttagtttatgtccatctcagccatattaatggcatttgtcccaccttggattgtcattgtcaaagagactctactagagctaatgtagttctcaggccatagatctattcacccacatctcagggtgtacacaggcataagtagtgtagcaatgactgtctttttatgtgattctgattgactgcaacaaagttaaactgctttgtccttacttgttaagcctcaatggctgcattttagatctcagagacaaggttccggttttttttttttttttggttgtgtgtgtgtgtgtgtgtgtgtgtgtgtgtgtgtgtgtgtgtgtgtgatacctttgaattgattgatctatcagtgggcatcgtcttcatcatacaggtacatctcagagtgaacagtttatcagtgatgtggcgacaattatcaaaatgtactcagagcaatactgaaccagtgtttaaactcacagcctagttcctctattggtaaagcacaatcctaaacatacaagaatgcttggccaaagctcaacatagagaatgaatttgtgtaaacattttttttattttttccatttaaattttggaggagaaaaaaatttaagtcttctggcccacttttctagatgagtatttattgatattgataacttttaatgttctccacgtttctggttcttccctccttaggaatctcacatgaagagtaaagagtaattaaaatgtgcaggatgacaagatggagcaaacagtgcttgtaccaccaggacctgacagcttcaacttcttcaccagagaatcccttgcagctattgaaaggcgcattgcagaagagaaggctaagaatcccaagccagacaaaaaagatgatgatgaaaatggcccaaagccaaacagtgacttggaagctgggaagaaccttccatttatctatggagacattcctccagagatggtgtcggagcctctggaggacctggacccctactatatcaataagaaggtaagtgtttttatcaggtatactttgccactaactacatttacattggactgttacagaaacctcacatactaaagtagcacaggcttaacaatccctctgcttaagaaatgagaccagattggtgggtggtttatgcatattcataagaagtaaataaattatattataccatatggagctgccccaaatgccccatgacagaaatctaaatatacgtataagattttgtaggcagctaatttaacaaattaaaaaaaaactctcactgaagattacaaggactaagcaattttaagtactttttttgtaccttgaaatgttgaagtcaccctgagttaccaaagacctaaaaatatattgtgtgaatttctcatggaaggaagttttacaacacaagaggtttttatttctatgccatattataaataataaataacttcctaagtaatcgtttccacatggaatacagttatgcaatatacatgggtattttgtgttattgttgttttgttgcttgtttttaggggaaaatgatttcttttggcttatagttcacatatataggattgttgggggcatattgcaattcaaccatttcagcacatatatgtatgtatgtacgtatatgtatatatgcatatatatcataaccatattatgtctacaaagactctgtttctaagattgatacagtttcatactggcttgaactttttgaagacactatctagccaattacacttgccagttgttaaagttgggggaatatataaccaagcaagtcaagtgtttcattgaccacgaatcctaaaatactccaaacttttagggacactgtactgttagcccagttcctgtcaggacaaaagctgccatatgtggtagcttggggtgagagaaatgtcttagttagagtttctattcttgggataaaacatccacacccaagacaacttgaaggtagggaagatttatttcagcttaccgttctacatcacaatccattatgaagaaagctggggcagaaaatcaaggcaggaacctggaatcaggaactgaagcaggagcgggggaagagcacgctcactggcttgcttggcctattttttttatagcacctgggaccaccctcctgggggtggcactacaacaacaggctaggccatgccacatcaatcatcagtcaagtaaaggcacttcaggcttgcttccaggccaatctagagaaggggcattttcccaactgaggttcccttttccaaaatgactgtagcttatgtcaaggtgacataaaagtagtcaatttaggagattgttcattctataattgctatttgtcagaagtgaatatgaggaaattacaaaataaagatccagatgtgttccacatagaaattggttcatctcatggattgtgtttatttacttacaattctcgggggggcatgcagtgtttcagaggctcctatggtccaggttagaaagccttttcctcatcaggtatttactcccccaaacatggcacctccaatttacagaccaaatccaccacctaatagttactatttatttatatagaaacaaagataaataaaagtgatttattaatgataaaaattactaagaggaggccctgtcaaaatacaaaattgaaatccagtatcccagcccctatacgatgtccttatttataaatctataaaggaataaaagaccaaatggaaacactttaaaaagcatagtaattcactatgtggtaaccagactgtcatagtgttatattgctatgaaaagacaccatgaccacagcaactcttataaaaagaaagcatttatttggagcttgctcacattcagaggtttagaccattatcattatggctgggagcatggcagcactcaggcagacatggtgctgaagaagtagctaagagttttatatctggacctacaggcagcaggaagagagaaccactgggcctggcctagcctgagctttggaaacctcaaagccctcttccatggcacccttcctccatcaaagccataactatgtcaagccacaccttctaatccttctcaagtaataccactcccctgattactgagcattcaattatttcagtttatgagagccattcttactcaaatcaccatacaaactatcaaactatcagatcctttttttttttttttttttttttttgtcttttaaattaaagagcttccagactaccaggcctggttgtacacacctttaatcccagcaattaggaggcagagggaggagagtcactgtgagtttaaggctagcctgatttaaatagcaagttccaggccatccaaagttaatagtaagactctgtcttaaaaaaataaaataaaatcaatcaaccaatcaacaaataataaaaataaaagcaaaagaatatgttttcaaaaacaaagagcttttaaattgatgaaagatactgttttgaggggtggttctacccatgatggtccctgactgggttattttgaatttaaaattttaaaaacaatggcataaaggaaaatggaaaacaaaatcacataacccagtgacaaatacttaaagcttttacaaaaagctcaaggtgtaagcccagctctgatgacttggcagccagatcagctttcctacccctgcccccaacctgcctttgacatcagctgtccttatcttcaaatgcacattgtgtgaagaaggaaaaacattcagacattttggaacaaatcacattgtgcaagcagaacaacctgataggagagatattgttatcaggaaggagtttttccaatgaaaggcatgtccttcattttcacattattcttccaccaaacagatctccagatgtgagccactggatagcagcgcaggtagacatttctagagctaagatttttttgtttgtttgtttgttttttgtttgttttttaaacagacacgctatgtgcttcattctttagtttttgagacagcaattccctatgtatcccaggctggccttgaactcacactcctcctttctacaggtgcagggattgtaggaatgtgtcagcttgtccagcatagagtactttagaacacatggccaagccacattcagaatgttgccttctttcatagtgctctgttttaaaaccttctttaggttgcctgtatattatgttactggtcttaaattttctctcataaatagattgttttcttatggtataatcttcataaacattaagttttctctgatttacattgaagttgcttagtaaaaatctcagtcttttaaaagaatatttcttctaatatttgatcactaattttgttttagtgactactatgtagccttcatatatatatgaatgagagagagagaatgggagacatagagggaaggagggtagaagggaggggaaaagtgaatgagttgaagcagccaaggggtctactggtcaaaaatcattaagggtgagattctccatgactgaaaaaaactgtgaatatggatttgttttgaagattgagttgaaatatgcaaacatcaatggcttcccttagattgaacttatttaatgagttatttttatataaatcatcatgctcatttattagcaatatgtaaaatgattttaaaaagccaaatctctaagaccctttagcctgctgtaacatcacatccaacatttggaattataatgaaaagaaatggattggcttaaacttatggagaccagagagtccaagattgaggaactaaaccatcacatggtggaagggtttaaggcaaggaggagcaagaagggtctattatcttaccctggaaaggcaccaattcattcttgaaggcaaagccttcattaaccaataacctgttaaatattcccaccttgtattatggaataattcaatttatgagttttgggaagggcaaatattgaacaatagcattgaccatgacaatggttacagaatgtattctttatggtatacctcaggctaaagtgcaggtgcaccatatgtgcagagtgctgtgtgaaggcactgtagcatgccagggctctctgtgttctttttataaagataaccaatgccattgggctagtggaaatgtcactgacagtggtatatgttatcgtgacatatgcccacatatttttatcctctttgacccagtttctgatctgcaaattatgtaataatcaaatgttctactaaaattattaaagtgatttaagctgtgatcagagatcctttattagcaatgaaagaaacagtaacaaccgtgaagtggaaaggagatagcaaagttgcaatgcactgagtttccatctcatggttgctgtcctcaggggacctttaaggtatgagtcgaagctgaatactttctatttgttccttcactttgtgtaacaaggacatttcagtttgtgagtacaattttttcttatgggactttttttttgtcggtttcataacttgagctactactgtaccatttgcctatacattcagcttcacccactctttgttcagaaaacgtctcccctcttatgttcttaaaattacagatgactcattagtgccatgggaagaaatatccttttgacaatgtggcatttgactagaaatagaaagatattctagatctgcagtgaaaatagaagcttgttatattttggaatatagaaatgtattcatttaaaaactgtactgtgtccttgaatgtttcctaacattaaaaacaacctattgtctccaccaacagacctaaaatgatggatactatctctctactggggttcacataagaggcttccaatttatatctcatctgtcatcacaagagtgtctatgattgaggtaccaagttcttattttgttttcagttagggtgaggaaggttttattcttctaggaaaatcagcccttagcctctgcctcagaaaatgtcccaggacaaataaattacctttgacatttagtttattctagtcatactagttaagagaccctttggataaaagtaaccaaaactcagcaaaaactactttgaaggagagacagaagaagaagaggaagaagaagaagaagaagaagaagaagaagaagaagaagaagaagaagaagaagaagaagaagaagaagaagaagaagaagaagaagaagaagaagaagagggaggaggaggaggaggaggaagaggaggagaagaaggagaagaaggagaagaagaagaagaaaagcaaacttatgggccaagtctagtttgaataacaaaagacgtggaatctaaactgacaccatcaggacagcccatggacagtgtaggctctgctttgctctgtgatggcttcctgcataggtgggctcacccacacatggcaaaaatagtccccagttacagtaagttaacatctacagcagagtaaccttgaggataggtgcatgcgttttccaaactctgagcaagaattctggaccaggtaagggtcacatgctgaatcacgtcctaaagaatgaggcaaatgtatttaggccacaaggacagacagtggagcagagatgttctccacaattagaagatagaaacttctagagaagttattccagataagtaaaaatgaacaactgctacctccctatatattatgcacttgcattttaaattcatgttggtaccttacaggttctttcaagacagttttggtctcaacttcagaataataaaactgaggttaaatagtttgtctaagattgcaaaaactaataagtaagctactggcatgttgccaaacccctgctttgtaaaaacaaatcttccatgctcagtatcagcgtctaatacaattcaactacacttaaaacttaaatggtgggcttctgaaaggaaatgacatctgaatttagatgcgaagacaagcttctgtaaaaaggaaaacatagaagatgctaacagagcatctggcctgtcatatgaggaggaggttagattctctagttgcagggtatacaatagatcttctatcatatgatggccttaagttagtgaagggcatcatttaggagatcccaaaaaaatgtcaattcaaataatgccatagcattccctccatctgccctgctttctcttccaacctgagaaaacatagatgtgacagaatcttccctctgtatacagtgcgctcttttgtatgagagtagatccaaagttaaaacttaagttaattgtgaagtactgatatctataatttttgctatttttgcacaatactgtttaacttttaaattatctcccaaagtttataaatgtgacaataatgactctcagatacccattccctctttccactctctggtcatttcagcttgtaatcagtggcttaaagaccttacccattaacttggtggaggctgtgttagattaattgaggttagcctgctgccgagaagcaaatgctgtgaggtaagctgtgaggagacttgtcatccctcgtgagccaaagaggaaaatctttgtttgaagccatgaatataaaagaggaggggaggaggaaaggagaccatttaaagattctcagagagggaaaaagacttagacgcatggattggacaagaatgaaaaatgttcacggagatggagactgacaggaatctctgactacctgaagcatcagactttgaagcatcgctatgttggtacatgactctcattctgccctcccacccccgccccttactgcggaacctctggaaatgtgccccactccctgatagggttagggcagtttctcagtctgaccaccagagtcttacagagtagagatgcgcacctgagcccaacttagagccatgttactatttccagactggcacttccttctacatagtgatacagttccaaccaccattaattcataattatatttctttaggaattacataaggcctgggaatagttcactggaggagtgcttacttagcacttgttgggcctggcttggatcccagcacctggggaagaaagttacattgagtttgagacaaaaaacaaaaacaaaacaaataaaaccaaccaaccaaacaaacaaaaaaaaaaacaataaaaaagaacatatttatttactctcttctgtgaaactgcattaaaattccaaaggaattgactgccagatacatttttagaaggcagatgatgtgtgaattaaaaatcccctgtgatttaaagttccaggcaaagaatatatttagtctgcttataacacctactatttatttggtttttcttttgagaaaaggttttattccagcactcaatcttgcctcaaactcacaacactcctgccttagctttgggctgctagctttacgggagtgaggctccacatctggatgtacagcttttaaaatatttctagttatccagctcactttttgtttttgtttttgtttttttgttttttggttttttttttgagacagggtttctctgtgtagccctgggtgcctgggtgtcctggaactcactctgtagaccaggctggcctcaaactcagaaatccacctgcctctgccacccaagtactgggattaaaggcgtgcgccaccatgcctggcatccagctcactttcacatgttatctctgacttttgcctgtagctaacttttagagagggaatggagtacatttcaatgtaatctctgttatgtcacagctttctggcaatgtctagatgaaatgcaaaattagaacttaagttataactgtatactttttttttttttaaatgggctcttgattgaaataaagtttccaccaatggctgtatattcagaaaacaaaagtgcaaatacaccacttgtcaaatccaagtttcatccctgacagtaatcgcagcagccagtcatgttctatgaagttactaggtcacagcaagcagaagggcccagtccacatatcctgtataaccattgagaactggcgaatcactactgattaatcgctaaccagcaaaactgttgcttcacaaaactcttgctcttaacttgagacaaatctgctgttatttttccctgaggtttgagttgtttgtttgtttctttgtttctttgtttctttgttttggcaggaggggaggggtcattaaaactgttgattaccagggatgcttatcggttttcaatcaaaccaccttatgcttttctttaacacctgaaataatatttttccatcaagggttgctgaagagtgtgacttggtctgtcaatgagtggttgaaagtcaggtcaaatctgttcagcacagtagatagacatcagctagtatggctacgggtacctaaaatagaataagaccagattgagaagactggagacattgtgaaaaaaatcacataaaatacctcagtgatttttttaatatgatgttatcctcaaatgttgtcgagttacagaaaacaccagtaagacgcacttcacctcttccttggcttttcatgtagtacttagacaatcagaaatccttggttaaagtacaggtttgtctttacattatgttcctattggttagttctaagctatctacacctccatatgttcgtcttctagattcatctgtgctactatctgtagctgagcattcctttgcaagtgcccggatttagatatgtgtgttttcttttcagaatgcagcacaaagctttgcaaatatagtgctaatcagtcaccttttacacctaaattagagcatatgacttcatttttgtcatataaatattacaaagacattttttaacacacacacacacacacacacacacacacacacacacacacacacacacacacacacgccggaaaagtcctaaggcctaagtaggaatacttagttcccataaatacatctataaaccagtttttatacataaaggttatatctgaatttacccattgtgccttgtttaaaaacttgttccaaggaagaaaattattctggtattaaaatgttctcatcaagtgcttatatttctactccattgcagtaatgagattaaagcatttatcccccccccccctataataaatgaatcaagggataggtttagtagaaggtttagtaccttctactaaaaggtacactcttggtgcttgccactgggcaatttgcacatgtaaatagagaagggggatgtctgggtggttggtagctttggagttaatcctttgttttaagtgaacattgatccccttggatccttttctctttcctccatgcagtgccttcagtgcggtatttctgagtggcactgcagttgtaacctgacttctcaactatagtaaagttgtgaggaacatagtagatactatcgggtaaaaaaataaatagcagaccagttggaaaaagtaaacttaagttctaaatcaaatttaatgacttcataacgactacaatcctacatataatgaggtgctatctaagtctgaatactgtctctattgcaaagctattgaagctaaacccataaacacttcagagtgatgtgtaggaagctcgcatttgcatgtatgtttcaatccaaaaggaatatatctatcattgggtaagaaacaatgaaagtggttctgcaaggctggcactattgttacagtccttggcaggggtgggaagaaatcttatgaaaaattaaagtacagaaagcatgctgtgcagtcaaagctcatcagtctcctgtttcaacccacctacattgcacatgaagttctttatgcaacatgtttttacaaattatttgcatttaataaatagatgtatcaaatatatcataaaggacagaaacctttgaaaatttaagaattatgtcaaggtgttcaaccactggtcgtccaaattttcaattattaatcaggactggggttgccgagctattaccaacactgctttgctgagttccagtgcctaaagttccctcctggttctctcttgctaagtttcagagtctcagctttggcctcactaataattcctgttttgtccctgcttcctcttttctcttttctattttctgtcaagtgttcctgtagtggtgactttgctactgccataacaaaactccatgactaaggaaacctgaaaaggaaagcatttattgtaggggttcgcatgagtccatgaccatcatgggggaaagtatgacagcagtcaggcaggcaggccagcatggtgctggaacagtggctgagagcttgtactgtatccatgaataagacacacacacacacacacacacacacacacacacacacacacacagagagagagagagagagacagagagagacagagagagagagagacagagacagagacagagacagagacagagtcagacagagacagagacagacagagagaacacaaactgaggttggtttggacttttggaacctcaaaacctacatctgttaacacatgacctccaacaaagtccttcccaaacagttttgacatccgaggcccacatattgaaatacacatgcctactggggctattctcattcaaaccactacagcttcctttactcatcatgtaaacagaaggttgccaaggaacctgtgtcattgcgattctgagtatagccagtttcaatgggatgagcctgggaatttccctgcccactgaactactactgaccctcccaagactcatcctccagcctgtaaaagatgctacagtaaccctgaaactcgtttgtcatctctatcaccatagtcatttcaaaatcggtctatagtaatatatgaaattagattcttaggtgaagagtatatattctttctagttacaatttttttaactacagttcctactctagcccccaatatttctatcacatttgactggctgtgtttctggataaggaggtacaggcaagaactttgaaaaaaatcattggtcctaagctttgctcgttctgtgtccttggatgctcacattccttaaggcaaggatatttcccttacccaagtccattcatgttttatgatgctttcacaaggtcgtttagggacaaaaatattgaatgaatcagagagaataacgggaactatgtaccaaccacaagcgattgccactggagtgcgttcctccctcacagacatcttaaggtcgtctcccttgtgctggatgcacccattcagtgatgattagatgacatgtggtcaaaggtcaggcttagagaagcagcacttttcccacccaggtgatgtggtctctgtttatctatgacacagtgacattaattgctaagtaactgaaatgaaatgggatagcccagcctacagtctcttgttttattttatcatcattttcaacagactcaaaattgcattacaactttctaaacacaggttttactctcagtagttggattttgtctgtgtgtgtgtgtgtgtgtgtgtgtgtgtcacagctgagaaaactaacagatccccactacttaggggatattttcatagtacatttagagcttttctgtttgaatcccagagagaaagggctattttcaaacagaaactctgtgttcaaggattgctccatttgaaaatctcaaggtcaaagtgaaaaataaaatgaaaacatgttagtgacctaaagtttaaatgtgaagaagaaatgctatcaaaaaatgctcaggagaaaacaaacggcacgttatagagtgtgctaatcatagcagggtccatagagctatgcatcaaaaggctaaaacatgggagttttaaggaatagatgcataaacatattaaaagctgtgctggggacagcattcggtggtggatcccttgtataacactctgggttggttatagattatacacgcatgtgcacacacaccctgagctgggaacatgaccctatggtaaaacacttgcttagcatgcaggaggccttaattgcattccccatacttaggaattagaatagagtcactaaaaaaaaaataaactcaaaccttagcattctctctatttagtgtgttattcacagagatgtcagcttcatccatctcggcctaggctgagtatcagtaaatgacttagaagactgtgtcagactaagccgtgttgctccattgcatggtgagtcttttccctctgcacactgatctttgctgtgtagtaagtctgactcttgtcgtagatgctcttcatatttatgggtcctgagttctccagggaccttgagcttttcctccacacaggggagagtcaattgggattagaaaccaagtgtcagctacctcaggaatcccaatacagaatttagcactcctggtcaacaagatactctccagggagcctgtcctgcagaaatcaatgactggatagtatccatccaataggtgcgggctagatggaagctgcttttgttctctattaccagcggagcgatgatgtttattttataagcacgggtagtgaaggaatatttatttttaaaacattcggttctgttgaatgattttgcatcctgcaggattcattttcctgatacttcatctaggcaaacaaatcattatgagaaggaattcttgtgaatgttaggatgaaaatgaaatgtgtccccatttcaaactttggcttaagtaagacacttaaaatattaaggaaatgaggacattctcgtggctgatgcacaaactcaggtaagtggttggtggaaggtaagagccactgtaagttcatctctgggacataagtgaccagagagagctgtactcatggtacatatcaaaagtgattgtcctgggcatctgaattggaattattcactgcaaccctattggaaaataggaagtctgttttatacttatgtgtttattcctattttacagacttttatagtattgaataaagggaaggccatcttccggttcagtgccacctccgccctgtacattttaacacccttcaatcctcttaggaaaatagctattaagattttggtacactcatatccttttgcaagtggttggtgttaactgtttgtattcattgtgtcttctatgtattattaagttaaaaaaatgtgcatatactctatagctttcatctaatatcttttgttggtcaaggaaatctctttttgtttttgtagtgctgagaattgaacccggggcctcagaaatgtcagggaaacaccctaccattaaggcaccccttcagccctgaaccctagtctacattccaggatcccagccagggaacggtgccagccacagtagatgggtctttccgtctgaattaacaaagcagtcacaataattccccagagacatgcaatgaggcccgtctgttagagtattctagattctgtcagattgacaactaacactagctttcatatatgtattgaatcccctaagttttgtgcaagatcgccatgtttcttgtcaacatctttgtacagagttgcataaaattttcagtaaaattaatcacacacaaaaaaactattttcaaagtaaaatacagattagacacagatatgatgtatgccattttaaagacctttggggggatcatgtaagcttataagaatctcaagacacttcaggcttagctagttagtcaacttttctgatcagttttatgaagttggctgaatatcagatttaagccacagaatatatgggtctgttgtatagcattgtctctttagtgcagattcaggaaagaagctaaaactgttctaaaaggttgaagggagtttgcctctgtggtcgcctttgggtttaaaggtttctgcaactcagttccggcgtggatattgatcagtgaaaaaccttcatttatgactgagtctcttttggtggccttggtcacaattagtataaaaatactattgtaagtatcataaggtcatactagcaagattttttttaaaatcacaaattctaaaatctaaagagttgtccaaacacaaggctctgggtttgatttgttccctggcactacaaaaaacaatgactaaagaagaaacgttcatttaaaaaaaataaaacaaacaaacaaaaaaacagcactacaccaacaaaaggagatacaaaacaaaacaagaaagtaaaataataactaacaaaaacaataaaagcaacaacaaaaaataaaggcccttctttttgagtccagttgatcacaagtaaatcgttagtcctattaatagtctatcatcgaacactaaagatgtaccttataaaaagtgcctatgctcactcaaaagcttttccatcttagtttgcatttctagtgccatcatgtggtcatttgatgaaatctttccctacacctaatggaaatgttttgtgtggttagtcgagtgtagtagaaagaatacctgctactaagacagaaaacacatattttaagatcctgcggatcatctgttttctccaggacgtagcggttatttctggcatttctaaaacactttttacagccactttcaatggccctattacctgttcttctctgacctaccactcagtgcgtacacatttctccagcggcattgcttccgagcatttcatactcactgattactttaatctacgcgaccaataacaaagtctgtccagcttaacatccgggtgttgaatgtaggtggagccagagggtggttgaaggcacagaaaggataagtgaccgattggcccaagaacaggtgtcactgtggaatttcaattacatcccagtggcgatgagccctgaccttcacacatctccccttccatcttctcatgctgttgtgcttacataaactcactcaaaacacggctacttagcactctgcaccacgctctgctttgaccgtgacgtcaaaattctatccattaacgacgagatctcggtattgcagaaatgcaccttcctcgaaaatttactattctaattgtgcaattaattcacatccatgctttctgctcaacaatgttgcaaataaaatttaaatacattttaaaagagagaaatgcatccaccacccccccaaccacctccacttcccgcttagaaaaagcaccttggaaggtaatcatgctggtataaaaacaaccgcaatagcaacttgtattcttatgtccttccatactctcatttactctgaaattgtggaggtcacactatgatgcatatttagcatcatatgaaatttgagtgaaatgtaaggagattaggtagtatttgtgcacatgtttacccatgagtcctgttgaactgaggtctgggtttttcagtgttactttggttttttttaatacaatgcatgaactttcttttgtatgttccttaacactaacctacattattcagcatgttaatcatgtgcactattttgacaaactgtgtatttatgacaatgagtaaccctcccgactggacaaagaatgtggagtaagtttattttaaatgtttgttcctgtacatatatttgagatttttgaaactatttctcaatgtagcctttaaattaaactggagaacatgtgtgataaagccatttatagatgcagctttaaaataagacagcagtcattgggtcccaggcttgctggtgtcagatctaggatttctctttactcatataattgatacaaagtctactagaaaactcaagggttttctttcaggatccagtatttgaaaagaaaattgatggaagtaactacagaaatatagacaatatatgctggactttttattccagataacctccacattaattgggctaattaagaatcaaaatgattaagctgtaaatgctacattaagaaccacagtgtaggggaatgccagggcaagaaagagggtgtggctgggttggtgagcagggggagaggggaggggataggggattttcagaggggaaagcaggaaagtggacaacatttgaaatgtaaataaagtaaatatctaataataataaagaaccatattgagtctcttgatcactgggatttatccaggtttatatctattttaagtatgatcatcaagaacttaactaaagtttcaggattataaaacttggaaattcagtttatggaaggctaaaatgtctacagtggaaattcaggaagcattctcaagggctggaagcattactaatgacactggccagctcttgatgccccagtagaaggagaggcagttatgtaactggagctctggatgtttcaatcgcagctttcgtgcctgcccatgttctgacacctagaactctctggtttctgacctttcaccccccacagtgtttcccaaagcctcttcttctagtgcttctaaatggaaggtcagattctgggaaaaaaacaaaacaaaacaaacaaacaaaaaaaaaaccataagaaactatgtatgtgatggattctgaaactattcaaactcacatgtttcctttgttggtatccatgttttccgaggacaacatgctaagaagctgatgtactctgaatgaaattacaaagtccttaattgatttggctacttgtttctaggtacaccttcacaggaatatatacttttgaatcactaataaaaattattgcaaggggcttctgtttagaagattttactttccttcgcgacccatggaactggctggacttcactgtcattacattcgcgtaagtgccttctcttttggaaacctgagagaatacagtttggtttgctgtctatgctcaggtttttaaacaacatgctcgagtggtaaaacatcctggcatgatttgggcacctgaactccgtgtcttaacatttacctcaaaagggtaaacccattccactgctccatgagaatagtaatagcaattttaataacacttaaaacatcagaaaattttgtagccaggcaggtgtggcgaacacctttaatcccagcactcaggagacagaggcaggtgaatttctaagttcaaggtcagcctgctttacagagtgagttccaggacagccagggctatagagagaaatcctgtctcaccccctaccccccaaaaagaaagaaaatattgtatattctggtctcctcacacaaatacttgtaatactgaagcataacttatttatctcctgagctggaggatggttttgaaagttcacacagcaaaatttgcactggtcccacaaacttgcactgaacttttcactgatagtcctgttgtgcctcaccccgtggcttcttttgttacctttatagaatagtagaaagattgtagccatgctggaaataagatcctaaggtgaaaaagacatttgatacatcataaatcaaataaatggttatttcttgagcagacataccttgcctctatttcccttctgattcaatttgtattcctctctctctctctctctctctctctctctctctctctctctctctctctctctctctctctcgctctctctctctctctctctccctccctccctccctccctccctccctccctccctccctctccctccctccctccctccctctcttgtttttaggctcttctttattttactcaacacaaagcttttcaatatacactgagttgtatattcagtccctactttcctgtcttctcccttttgctagtgataaatcacgcccctccacaccaggaagagatgagaataataggtagctattcaagaatagtcaaaagtaggtatggaggacagtggattaataccacttatcccatctgggtagctgactttctgggcatcagcaggagtgaagggatacacaggacaggagatggtactgatcggctccaaagtgcaaatcctggatgtctgaccttaactgtataactttatgtctgattggaatatgaaaggttcccatgcgtttcagccacaactttcaggacagtatttgagacttctcactcttgagactaaaatagaagtgatgacagagtggccttgggccatgtaagatgctattgttaatttatttgttcaacttctattcaaacgttattttaggaaatgcgagtcttgaatagtggggcaagaggcaatcttttataatcgatagttctgttggatgatttcctatatcatttcttttctagctgaaaccctagcctgtggatttggttccagttaactaattaatttagttaattttcccaattcacatatagtgtttctaccttgcctaccaaatggcatcaagattgtatattttatgaaatttacatttagttgtggtatttatcatgaaaaataagactacattgatgaagtctaaattttaatttgcaacttacactatttaaaagcagcaaagatcttcataaaatatcagataaatgctagtgtcttttcaatcttaaatcatttacaggtaagtaacaaagtttgtatacctaggtaatttttagctattcacacatttagaggattgagtctaaagaccattcccacatttctaattagaagcaattactataaagcataaggtaattgtacctacaaaactttctttgcttcctgttattgtgtctgtgtgtgaactcctcattacagatatgtgacggagtttgtggacctgggcaatgtctcagcattgagaacattcagagttcttcgagcattgaaaactatttcagtcattccaggtgagagctatatgaaagcatgtaggttaatcagtgagttaactctgagactttttcaactgagcctccttgcttgccattcatcattacagaaagctgagaatcataagactgagtacttcctataagattactctctctggaggttttatcaacctttgtgtttaatttgtggacactctgatattcaacccaaccaacttttactatataatgtatttttgtgccggacagtggtggtatacacctttaattccagcacttgggaggcagaggcaggcggatttctgagttcgaggccagcctggtctacagagtgagtttcaagacagccagggctacacagagaaaccctgtctcgagaaaaaaaaagtatttttgtaatgtcaatgttataaagaatttgttccctattatatgtataaatttttcatttttattcattatacccattgatgcctatgcaaaaacaatcccattctttgctaacaaaagaccaattataagacttaaagaataacctacaacagcatgaatgctatgttcttaaatgaagctacactctcgaactttttataggacaatgtccctgccatgggccacattttgggacttacacgtttatttagtgtctccgagagacttgtgtgaaggacttatttaatatttcagatgcttgatacacttctttctctcaggcctgaagaccatcgtgggggccctgatccagtcggtgaagaagctgtctgacgtcatgatactcactgtgttctgtctcagtgtgttcgcactcatcgggttgcagctcttcatgggcaacctgaggaataaatgtgtacagtggcctcccaccaacgcttcccttgaggaacatagcatagagaagaatataactatggattacaatggcacacttgtaaatgaaaccgtgttcgagtttgactggaaatcatacattcaagactcaagtaagaaccatcaatatgtgtacttatcctttcatagtctgcctgcttcctgtctagtcacagactaaacatgatcacaaggatgttgtagtcacttagaaaattatctgatgtaaattttgaaaatatttacacaccttatttcttttattattctttaatctttctttactttaatctttcagtcattatcccacttccagtctgccctctgactagtcctcatcccatacctcctccctcctaccccatttccaagaggatgtccctacaccccgcccacaccccaccccaccaaacctccccactccctgggatctcaagtctctcaagggttaagtttatcttctctgactgaacccagacctggcagtcttctgctgtatatgtgtcaggggcctcatatcagctggtacatgctgcctggttggtggctcagtgtctgagaggtctcggggatccaggttagttgagactgctggtcttcctatggggtggtcatcctcctcagcttcttccagcctttccctaattcaactgcaggagttcctggcttctgtccattggttgggtgtatctgcatctgactctttcagctgcttgttggggctctcagattgcagccatgctaggctcctgtccataagcacaccatatcatcagtaatagtatcaggccttggagtctccccttgggctggatccctaattaggctggcactggacgtcctttccctcagtctcttctccattttagttcctgcagttcttttagacaggaacaattctgggtcagagtttttgactttgggatggcaaccccatccctccacttgatgtcctgtctttctactggaggtgggctctacaagttccttctacccacggttgggcatttcacctaaggtccctccccctgagcgtctctcaccttcctggtctctggtacattctagagggtcaccccacctcctacctcctgaggtggcctgtttccattctcttttttctgttgttcctatctactcatttcacttcttgaaaggatacaaaatcccaactaagttatagggggataatgaacgtcgctttatttctaatactgctaatacttttttttctttttttttttttttttttttttttttttttttttggtttttcgagacagggtttctctgtatagccctggctgtcctggaactcactttgtagaccaggctggcctcgaactcagaaatccgcctgcctctgcctcccgagtgctgggattaaaggtgtgcgccaccacgcccggcgctaatactttttgaatgagtagttgcaatgggataatggtttttctgaggatactgtgtgagcatacaacctactggacacaacctgaggttgtttcttccttgtcaatctttgatggaaaggaaatggatggccaaggaaagtcttgcagacatggctcctctagtaatgaaagatgtgaactcttgagaactagggagaactgataagatttgatgttcgcctactctaattgttttaactttaatatttaagatgttctacatttttcattaatttgtaagaaatattatttgttttatattcaattctaaaatatttcatttcattaaaatattcagatagttgatacaatttgtgtcaattgacatatatactacgaactgaaaaatgtaagttataattaatttgaaagttttaacagggattgaaaatatgaaaatagaacaagaaaatatatcatttttttcttttgaaatatgtagttatttttgagatacccatcattgtcatcttctttggatgatgaactttttctttattttacaaaagtagtagaaaatactgataccttttcataaatgttccctaagtacccatggttgtcactaacattccactaataatgaaaagaaaaaaacctcgtacagttgattatcgatacctttaatttaataacagaatttgaaggaagaaaaggaaaaaactcatgtgtttaagtggatgataagatacttgtaaactcacttagtgaaccaaaaagtaagacctgactttcctactcttcttttaatgtgtttcacaatgcaagtgtgtatcatgtggctttctctttttttcaaacaggatatcattatttcctggagggtgttttagatgcactgctgtgtggaaatagctctgatgcagggtaagctgatcacgcgtgtgagatgtatgtgtagtatgtccccatacatatgtttgtatatggatgtgtctgtgtgtatctttggctctagaaattgactgataacagcaactaactttatgcatactaattgtcagtaactatgatataaataaaacaagaaattatctaaatattaaagtttcatctgtaaagcaagaagcaacactttgatctgtaatgctattttcttggtgtacgtataaagctatgaatcacctttggagacttcacagtgaggggaaaaggttactaagcaatatcaataccttgcagctaataagatagatactatggagtcaaaggtgggaaatgtatcagcaattcggattccacacgcctgtgtcctttaagtagtgactagattattttgtaagtgtaggcttctaccagagtaagaagacagcagaatgtcttgtcatactttctttttccccatttgcagccaatgtccagaaggatatatgtgtgtaaaagctggtagaaaccctaattatggttacacaagctttgataccttcagttgggcatttttgtccctgtttcgactgatgactcaggacttctgggaaaatctataccaactggtgagaatctgaaaatttaagtaaaagcgtgtaagaacacaaactgagtcatgaaacacaacccgcagcatgatacagtagagaaagaatgactcggactcctctaacccattgattacaatacgcattaaatggagtaacgccaaggagagtaattctgttctgtttctccatgccttgaattctatttctcattcctcttagatacaatttctcctaagcaaaagccaagtcttccctctgccctgtcctctgctcaagtattaccttttccattggtctctttaatttccatgaaaggctcagctttttcatggtggtccccattgctttctatcaactgttattcctggtgaatccaagaatcccttattatgactatgaatgcttatcttaaagaagaaagaagagatagaggttaaagaaatactgatgggacacaatgttaattttgtcagagttctgccacatacacaagtaagttaaaatgtgaagtcacccaataccgacataattgtaaaaataattctcatattcttgtttctagacattgcgtgctgctggcaaaacctacatgatattttttgtgctggtcattttcttgggctcattctacctgataaacttgatcctggctgtggtggccatggcctatgaggagcagaatcaggccacactggaggaggctgaacagaaagaggcagaatttcagcagatgttggagcaacttaagaagcagcaagaggctgcacaggtactcagcagttcaagtaggtcttatctccgaccttcatttctctagtcttctggtgtcacctctttcactgccatgttacaaagagctgtaatgaaacaaaaggcagagtcatctgacaggatgtgagaaagctgagcacatcaaactccaaggacttctatgtatgggtcatctttttagtttgaattggcctagtcacatcactaagttgtacagagctgttttacactagctacagaagatgcttcttatgttatttttatcactttaaatagaatcaagaagaaaagagaaatagtaactttgggcttttttgcccccccccaagtttaaaatcttttactcaaatatactagcattagaaaaagtatcataagacaacaatcttttctgacaagcaaattcattagttgacatataaaacccatttggccatttcattaaagtaatttattattttctttattcagaaatacaatgtctttaggtggggttgttcaatttccttttaataaaatgttctcttggtcaaaaccatccactaggcaaagaagcatcattagcaatatggagtactacaagaggtttacttgacctttccatggcttgtcagtgtacctgactcactgaatgaaaaaaaaaaaaatgaatccaattgcccacgtttccttgtggtttctaaatgggacatacgaattcattatgtgtattttcaaaaagactaattaaactatttaaatcaaatttatttgtaaccatcttgaccataaaaaaaaaaaagagttacttcaagcatgctaatttatctgctacagttctagattaagggaattgtgggaagaatgttgactaagaagttctaacttcttcataacagaacaagctgtgaccacacagcatcttaccccataactagtaagagccaacattgatatgaagatagttgggatggcttttagagaactgaacatcttttaacttgcttagcagaaagctctcaactctctcctttctatagataactgtatcaggggagagtgaggaagaaactgtgatatgtttcataacgctgattatgtggaacatctccacatatgttgatactatgtggaagatattgaacactttgataagcatggaaacctgagaggacccctgctcactacctcattaccagctttgaatagaatcttgagttattcttgactgccaatgaatcttacgaatctctgcggcatcagacaaagttaataaatgttaccatggagaaaagtagattatttttaaaattcattattagttaaaaagaaaaaaaaacttcccttcatacctggaaaacatcatctagatgttggtttcagttagcttgcattttggacatgacacaccaaacttgagcatcttaaagatttaatgcagtcgtttcttgcaacacactgaattggtttctcctctatatagcaggcagcggctacaacagcctcagaacattccagggagcccagtgcagcaggcaggctctcagatagctcttcagaagcctctaagttgagttcgaagagtgctaaagaaagacgaaatcggaggaaaaaaaggaaacagaaagagcagtctggaggagaagagaaagatgatgatgaattccacaagtctgagtctgaagacagcatcaggaggaaggggtttcgcttctccatagaagggaatagactgacatatgaaaagaggtactcttccccgcatcaggtacgcactgcagagttcttggatacaccgatgagagtgagccatctgagagagaatttaaatagatggatgggttttcatcaaccgaattgactactgttgcattacacttaaaactgttttttcccctctatgtagttatgtgaaagttttacttcccatccacatatatgcaaatccactcttaggtgcttttgaaataacacaggattggaagacaggagaactggcttttcatgttaaatgtgccttctggtaattgtaatgacatttaatcttgcagctattctaaccacatcaacaaaatgtagactaggggttagctactcagaaatgtacctttggttaatttaaggcaccatgttggttgtcatcccataacttctttatcaattatcccatgaactttaaaaatattagccatgataaactttatagaaaagtgcatcattcagaatttcgaaatttttactttctggttctacaagtaatctgttttacagctgtgtcaaaaaaataaataacatggttttaggaaactgaactaaaatagtctgtgaaaactattgttggaattatccaaaaggagagagaaattaaaaaccgttgctgtcttgctgcccatgttcattgtaggtggatacatacatagagagatttttaaggatgtctctgtttaaatttgagacgtggtggctgggtatttttttttctcccattacttttaggctgcactccagctatctgttatttaatatcaatggctggaagccatactgtatagaactaatttaatctcatctgaatgccaataaattatattaatcagaaggaatgtgctaccctctctaaaataacaatgcaatattcttcaacttaaacttgcaaaactatttcaacaggcagttctaatgtaattttactttttgtcatgtgtttcaaactttcagtctctgttaagcattcgtggttccctgttctccccaagacgcaatagcagaacaagtcttttcagctttagagggcgagccaaggatgtggggtctgagaatgactttgctgatgatgaacacagcacctttgaggataatgagagccgtagagactcactgttcgttccccgaagacacggagagcgacgcaacagtaacctgagccagaccagcaggtcctcccgaatgctggcggtgtttccagccaatgggaagatgcacagcacggtggattgcaatggtgtggtttccttggttggtggaccctcagttcccacatcgccagttggacagcttctgccagaggtgataatagataagccagctactgatgacaatgtaagaaagttttacatagttcaggcatggctggcctatgattgctgcaccagccagtgtttctacagaatggaactcttgagaatgattcctggttggtcgagctgagaatgcacctgcatcttgtagcacctttaatagactaaccagctaaatgttagcgcctcggcactccttgcacaaacctgaatgcattacctactgtatatgctaaggattaattgaacaataattacttccttggatgatttgctatgtacccataccgaatttacatatgaagacatcacccctagtgccctattattgtaagattaaatgaatgactttttagtgtaaagggtgtatagtaaatcttcccactaaactcttacagtttatctgggctttagttcagattttcaaaaacactgtgcttagatagcttcatcattacctacattttctaaggatcatatttatctcactaagaaagaaatgctgatataggtattcacaaaacaatctacacagagacaccaataaattattaatccagataaaataattggaaatatatcagcatgacgaggcatgactcggtgtaaatcagatgacttattgctttggtatcctggatgaaactgttgcccctgcatcacatgcatggatcagcatatactttataataaatgagtatatgtcttatgcttagaaattgagatgacagctaagtgtgttatggtcttcggtattttcttaaaattaaacagctactttctcgaaagtgaaaaatggcctgaccatatataagattttaaggcattaagatttgacagtatgttcattaattgaaaacaagctataaatgcctatgcaaagctttactaactatattttgatcgcatcctatttcataagagtataaaatcaaggaggggtcaaaattttatattttcctttatgactacatggttaactgtttgaatattccaggttaatgatccaataagtcaccagtatctgccattggccatcaaagatgaagacgcatgacgcatgtctttcatgaaaatcactgtctccatttatttctgtgctgtattgctcaagctagtcatgtaatgccttagcatttgctttgcagggaacaaccactgaaactgagatgagaaagaggaggtcgagctctttccatgtttccatggactttctagaagatccttcccagaggcaaagggcaatgagcatagccagcatcttaacaaatacagtagaaggttggtaacaaaccctacctccctcagttcagccatcttgcaatatcttgttggagtcaactctctctacttatgtgttggcaagtacactctatgaacaaaagtaaaaggaacagtcctactagcaaatggctggtgatgtattctgaaagtattacatactaaattcaatgttctaaacttctgaacttttaatgtcttaataagtatgtgggaacagctagaggtttctaatccattagtcacaaatcctttgttgtaatgtgcttcaaacttcagcagcatggccccttacattatgatctgaaataattttaagactggagaaaagaataagtcactttcacaaaatcaaagcataaagaatgatttctttatatattacattaatccttgtcctaaatcttaaaattgtgtagcctatcagtaacaagaaattttacacagagtgaatagttccaggctatgtttccatggaacctttgtctatatgcccaaccactgtaatagaggccaagtgttaagcaacactgtctatgcaaaaacaaaacaaaaagttttctttcctatctctatgtacatgactaatgatactgtaccattttatcaagtaattatctttgcagcaaagagaaatatgtttgctactgagagcatgtttagtggatctaaaataaatttgtaaatttgtaagtcagtaatggtgttctttcagaatctaaggccatgatcttctttaaatgatagaatcactgtgtcctagctctagatggttcaaataattggttattgtttcttctattttttttttaaatctagaactagaagaatccaggcagaaatgtccaccctgttggtataaattttccaacatattcttaatttgggactgttctccatattggctgaaagttaaacatattgtcaacctggtggtgatggacccatttgttgatctggccattaccatctgcattgtgttaaatacgctcttcatggctatggagcactaccccatgactgaacatttcaaccatgttcttacagtgggaaacttggtaagtgtgcaagaaggtaaataaatgagcttggtcttcaaattttctgcttaagaaactgtttattatcttcaatagtttattagacctctttcaaccacaattcctgcatccctaaggcaataatatccagacgggtacacactaccttttgccaaataatggcctttaatgtctgtgcaaaaactgagaaatagaacatagacctgtaataataatttaaaaagtcagtaatggtgttctttcagaatctaaggccatgttcttctttaaatgataagatcactctgtcctagctccagatggttcaaataaggtcatgagttctcttccttatatgctctttcaaagaatgataacacaaaagtgtctccatcttttttccttccagggtcaagggagtctaagttctgttctagattcatatcatgaaatattgacagtacctagtgcattttgtacatcatatgattagtaagcccatttttagtgaaagtttcgacaatattctccattttttactttgaagcataaattgttaaaatattttccagcagactcaacttaaaagtctcaggtttttatttgaagaaagaactatctaaagtataacatgcattctatataatatctaggagaatgtttagtatcttgctgataaagacaatgtaaatatgcatatgctatagtggatttatatttttaaatctctactatttagattctggaaacgcacttttagtgcatgtgactaatattaatgatagtgatgagaataatataagatacacatgatttgaagggaataaagataaacttacaaataaaatgttttggggcaaaatcttgtctaggtgacatgaggtctggaagttggttaataatagatgggcattttatataccttgaaatattgttctcttcatctgtaataaaatagttacagcatttacactatctggttattggagcttctatgagcataaaacagtaaactaatataaaccagcattgtcaaataaacttgtaggataatcttaggatcaataatggaaaagtagaagtagcattagtcttttatatatatatatatatatatatatatatatatatatatatatatatatatatgtatatacatatatatatataatattatctttgatgttatcactatctaagataatttaaataatatggttttgcttttaggtcttcactgggattttcacagcagaaatgttcctgaaaatcatcgcaatggatccttactattacttccaagaaggctggaatatctttgatggtttcattgtgacactcagcctggtagaacttggccttgccaatgtggaaggattgtcagttctccgttcatttcgactggtaaacaagacaactgcaataataactgttttccccagtggtgttctctcatagtgcttccctatacttttccacaaaactattatcattttaagtttttgtgtaggctgatacctctaaatggggaataatatctctcaggtaatatttgtatatttttttacaaaggcaactttcttctgaaaagcctatttatgtaaactttctaatattatcatttataagtttgcagtgctgggttacataacccagagccttgagctgtcactagccccgtcacgtgaacactgatatctttttctattgctgtgttgataatgtgttctttctaatgacttggacaattaatactttcaacctgaagaagtgtgtttaatagaaatggttaataacttaataaatgttgaaaatgtaaataactcttcgatattcacataaaatgtatgcatgtaattctacttctaaaaaatatgttccataaaaacaaaagtttgcaggtctattaaggatagatagatagatagatagatagatagatagatagatagatagattcatacaaattccctgaagattgaggaagagtcatagcaaataatccaggtttaacaatacattgcatttatttatatttttcctctgttataatattaatagataataaatatttttcattttattttcatcaatgctctcaatgcaatgttacttagaacctttttgacaaatgaatcctttggcagaaattattcacattcagatatcaatatgacactataaaacttggaagatggtctcagagaaacaaattaaagaatatagtttctaatatgcaactaggaaatcactttcagagaagatgagccacattattaaaatctggaaaagctagattcttcctatgagggtctaaatattaactatgaacctgagaaagttagagcaagataatgtaagcagaattttttaggggtgtgtagtgctagcaacggatctcatggctgcatgcccactaaggaggtgttctgtctctgagctgcagccccttattctttagtaagtctcaagataattaatgcttgtgaagatcataataatgtatattaatttgttctcattttctagctccgagtgttcaagttggcaaagtcttggcccacactgaatatgctcattaagatcattggtaactcggtgggagcactgggcaacctgactctggtgttggccatcattgtctttatttttgccgtggttggcatgcagctgtttggaaaaagttacaaagattgtgtctgcaaaattgccactgactgcaaactcccacgttggcacatgaacgacttcttccactcgttcctgatcgtgttccgcgtgctgtgtggggagtggatagagaccatgtgggactgcatggaggtggcaggacaagctatgtgccttactgtcttcatgatggtcatggtgattgggaaccttgtggtatgtacccaagttagatatgcatttcagaaatacatcaataacataacaaatttgtgcccaatttattaaaaaatgactttcatgataaataattttaaatgcctctgatcttaagatatgtttatcttcttattctaaaaatataccgcaacatggcaaagtatagtatcacaatctactatggtaatatagaaatacatcttaaaacaaatgtatgcacattaatattacctatgatattttactctcaaatccatattttacagctctatttttttaagacaaggtttctttctgtatccctggctgtcctggaacttgctctgtagatctagctgggcttgaactcagagatccacctgcctctccatcccaagtacttggattaaagtgattgtgccacctggcttctcaactctattttattcagtcacttcattgcatttagttattaaattgcataggactgttaaaaatttacacaaatatgttatgtgcgtgtgtttgtgtgtgatgtctatgtgtgcgtgtgcatgtgagggagaaagggggcaatttttgctatagaatagtgctaacaagaatggtccatgcatatgttgaagactttcattctaaatttggtcatgactatgatttttttcagttatcatccaacaacacaaaatcatgaagagagaaaacccaaaatacatttaaataaataattgcaaatattaatcatttttaaatttggaattgttaaagtatctcagtaaatatatcttcttttactcatataatattaaatataatgataaactaattcattcaagttcttcatttcatgtatgggagatcttgagagcagtagaaagaatgcctcatgtacatagagatggagcaatatcacaaattcagagtgctcaaaacttttctagggcggagtgttgaacccagggcctcatgttttctggtcttggcccacttaacttctagcaatgcctgtgctgtatcttgctcatatagcattcggttattcattctatagctaaaggaataagccatcctatgtcctctgtgttgtggtgaacacatacttatgtctgttttcaaggtcttgaacctctttctggccttgcttctgagctcatttagtgcagacaaccttgcagccactgatgatgacaatgagatgaacaacctgcagattgctgtggacaggatgcacaaaggaatagcttatgtaaaaagaaaaatatatgaattcattcaacaatcctttgttaagaaacagaagattctagatgaaattaagccacttgatgatctaaacaacagaaaagacaattgtatctctaaccacacaacagaaattgggaaagatctggactgtctgaaagatgtgaatggaaccacaagtggcatagggacgggcagcagtgtggagaagtacatcattgatgagagtgattatatgtcattcataaacaaccccagcctcactgtgactgtgcccattgctgtgggagagtctgactttgagaacttaaacacagaagactttagcagtgaatcagatctagaagaaagcaaagaggtaagatgctgtaaattggggagatgtatatgtataaatatatgtatggattatactttctgtattaatgattctatagaacctttttgatataatatcaaatattattttattgagattccaaaaatcttttctcagggagatgaatgccaaagcaaaatgtaatatactgttgtatgagttttctcattcttaaaatctgtttgttaaatgggtacaaataatgaattaaaaactagcatcattagttacttaatccttgtaatgaacagaaaggaacatattactgtaaagtttcaagtgaaaaaacaaaacaaaacaaaacaaaagaaaaaaacaaccagctttggctggctaagagcatgtaacctgtgaggggtggaaccccactttgaacctgaagcctttgtctttaagttttaatatttttgtgtgtgtcatctcagtttaaataactgagtgaacttcagaaaaaaagtgctccctaccaattgtcacattaaaattacataatgtcataaaatagcatggtgctaagaaatagatggcttacacacacacaaaaaaaaaaatttattcacaatctggaaagcagacatttcaagaccatggtactgcagggtcagtgtctggggaggactatttgctaaggttgtagatgtccaccttctcactatgtctttacaaggcctgactgataggtgcactgaacagaaatggatctcttgtctcttcctcaacttgtaagggaattactctattggatgagaatcttggagtcattagataagtagagctcattatcaagccagaccttcagatatttagagactctcagtttcagcaattgaatttaggatagaagaatgggtaggggaatgtaattcagtccatgaggtcctacttgaaaatattaaagctaaaacatttgtggatattaggactgtctctaacttgggctaacttaccgttactatttctgaacaaccaacacattcctgtgtatattgctagctatggtgttcagtggtttgtgtgtcctgaatggtttttttttctctaactacattttcatcttacagtgggatttctgtgatataatgctattgcatggaagtctcaaagataacaaagcatatttagagcttgagtaatctaaatactttaaagacactctattcaaagatactctattcctattaaaaatcgactggtatatcaaccataagcaagggaaacaatggtgtgttttggttggtagttcctagagcagaaagcatagacacatgacatgatattaggttgttgaatatgtctatttaatgatgattcaagcttttataaaaactttggtgtcatattggaattcccacttttagaagtaggaactgatattaaaactagcagtggctgcattgagatattttggggtcttctcgtgaaagaagagaaagcaaaataacacagaagtgagacagtggggaaactactaactccaatgagatggatttagtgtgggaggaagatggacttttttttttaacttactgaatgtcttaaggactactatgtgaacattgtcttatttaaaatgtttacttagtacctggtgttttctaggaaataaatggtagatgtcaactgtgaaataaatgtttgttgagcatggtacctaatgactaaaagcccatcattgggcaggtaaagtcagaaagatcaggaactcaacgtctcagctagatagtgagcttcagggaagcctgaaacatataagatcacatctaaaagtaaaaatatcaacaaaacatcttatttaaacacatcattctaaatttctgacaagataaatttccaaaattcgttctagtttgaatctcctcatcttaagtccttgaatctataggcgtacatttaatattggctgaataatagtagcagctacttattatgtactgaatattactgataagcaattgtattgtaaaaagtatccataaaattatctttccactgaaaattaacatgattcgcatttgtacagcttctgtttgcattaatcaggaatagaaagagcactgacatcttcatcactgattgtccacagaacccctagagcccatagccattcttttcccatgctcttgtagctcagaaatctgctgatttaaaaatcatggatattacaatagtataaacattagagatgtaatgtttctaaattacaagccatcgcccagttagagtttaaaagccaatatgttaccccattttttttaaattttagtatattagaatagattgtgtcaatgcaatttgcctattgtgctagtacccaaacagggtgtatggagaataccacctgtctttatattgagaagttagggtagtagagaccgacattagggaaactgatgatatggggcactaagggctggtgtttgagcttccctgctgctttataagaactactgtctcaatagtgtctttttctttgatatgacagtgttgctttgttgagagtcattaatagtgatcattttgattttaatgcatacattagaaatatctcctaaggcagaatatacacaacaacatattaacattcatatatttaatgctatggagtatgatggctaatctgcattgtctacttggctaaatgtagaaccacctagaaaactgtaaggtgcaccccaaagtacatctattagggagtttatataaagggttaactaagaagaaaactatgtttaaatggaaatgacacccacccagggactgggagcacagactgaataataaaaggagagggggaagaagaaatgaagaaggagaagaagaagaagaagaagaagaagaagaagaagaagaagaagaagaagaagaagaagaagaagaagaagaagaagaagaagaagaaggaagaggaggaggaggagcaggagtaggaggaggagaaggaggtggaggaggaggaggaaaaggaagaggaggaagaggaggaagaggaggagggggaggaggaagagggggagaaagaagaggaagaggaggaagaagacgaagatgacgacaatgatgactaccagcagaggctgctttccctttcttggttttcttgctcaccatgacatgcactgctctaaaccaacatgctctctccccaccatcatgcactgcctgctcagaaactatgagccaaaagaaaacgttcttccatttaaactgctttgccaagtattttaaccctttgagacaataataactgataaacagagcatcaggaatctcatttatatatttttgtataaaagtatcaagtcagcgaaaggctaaggttaaaaacacgtcatgctttgttcatagatgagtatgggcttcatttatagataagttccttccgtgctagtctttgttgcatctctctctctgtacatatgacagtgcactatatgacccatcagttacaaaatcccaattatttttatcacttattaaaaagtaaactttcgggctcagggggtaagagcactgactgctcttccaaaggtcctgagttcaaaccccagcaaccacatggtggctcacagccatccgtaatgagatctgacgccctcttctggtgtgtctgaagacagctacagtgtacttagatataataataaatcttaaaaataaaaagtaaactttcattaatatacattaataatatccctgtaataaactaggtcacaaaataaagacatctcacgtttaaagttaaagctgagaagaaagagacacctgactggttccttccaaagaaaccccaagctgtggcttgttctgttgctgttttgttttgtttcattttcaaggtcattttctctaccagagaacatctttaaaagcaaaaaaaaaaaaaaaaggaaaaaaaagggagcatgaatccacggtgaagggaaaatgctcttaccatcagggtcgcagttagtaactgatcatctcacctcataaataacctgccaagtacatatggattgcacagatcagacggtttatatggaaaaatatacccagcctctaattaactagtccattagggaattaataaattgaagattgattaatagcatattaaatgctaaaatggatttaacatattttattaatttcaaaacactaagaaacatactttaaaaagcaaaaattaataccaacttaagaataaaaaggaactagtctacttcattaagttttaaaataataaaatacttgtttgacaacactgggttgcattgttacctaggatctttagaatattgtatgaaacatgtctgtgtgcaaagttgaggtgagcccctccctcagagctattgagcttcctccctatttgagtagcagtgataacttaaccaaagaactgcacttactttttgttttaacaatgagataaataataataagcatacctttgcttttagagttctgaagcaatgttttatctcatgattaaaatgtaacaaattaaatgacgacattgagactcctttattttatttcatataataagacttgcaaacacacacaaacacacatgcacacacatgagtatttgcttttatgtctatctgtgtactacttacatatcttcttcccacaagatcagatgagggcgtcagaacctctggaactggagttttagatggttgagagctgccatgtggatgcggggaattgaactcaggacatctggaagagaagtcagagctcttaaccgctgaaccatctgtagcccattactagtatttttaatgttagtattatccacaagtatccatagatgtttacaaaaaggaacagtatatcggaactcaaagtaaagcttagaaaatcaagatagcagatattgtatatggctatctgacctcaggtcagttaaactgaaggtaaaatataagtcagaagacagaattgcatttaaaaataaggagattaggcctttatgtaaccaaaattccagtaaaggtggttgagtttgtacacaccagtgtttgttgtctttttatttttttgtcttactgtcccattatatcctcactagaaagaaatatttcgacaactcaaaagaataaagtttgaatagaaataatgtaagcctcagactatctttatgaattaagatgccaatataaaaataacaaggaaaaactgtcagtctgcatatattctttacaaagactttggaagagtgaaaattttatgtaggtagcctaaaaaagtcaacatgtgaaatatgaatgtaaatacagtctaaatgaattttttgaagtgcatatctatttgccttctacataaaatgatattttgaaaatgtgtcaaaagataacatagtgccttttgggttcttgcaattttcattccaggcatttctcagataagcctttttctttttttccattttttattaggtatttagctcatttacatttccaatgctataccaaaagtccccatacccccccactcccctacccacccactccccctttttggccctggcattcccctgtactggggcatataaagtttgcaagtccaatgggcctctctttgcagtgatggccgactaggccatcttttgatacatatgcagctagagacaagagctccggggtactgcttagttcatattgttgttccacctatagggttgcaattccctttagttccttgggtgctttctctagttcctccattgggggccctgtggtccattcaatagctgactgtgagcatccacttctgtgtttgctaggccatggcatagtctcacaagagacagctatatctgggtcctttcagcaaaatcttgctagtgtatgcaatggtgtcagcatttggaagctgatcatgggatggatctctggatatggcaatcactagatggtccatcctttcatcacacttccaaactttgtctctgtaactccttccatgggtgttttgtttcctattctaagaaggcaaagtgtccacactttggtcttcattctcttgagtttaatgtttttagcaaattatatcttatatcttgggtatcctaagtttctgggctaatatccacttatcagtgagtacatattgtgagagttcctttgtgattgggttacctcactcaagatgattccctccaggtccatctatttggctaggaatttcataaattcattctttttaatagctgagtagtactccattgtgtaaatgtaccacattttttgtatccattcctctgttgaggggcatctgggttctttccagcttctggctattataaataaggctgctatgaacatagtggagcatgtgtccttcttatcggttggggcatcttctggatatatgcccagaagaggtattgctggatcttccggtattactatgtccaattttctgaggaaccgccagactgatttccagagtggttgtacaagcctgcaatcccaccaacaatggaggagtgttcctctttctccacatccttgccagcatctgctgtcacctgaatttttcatcttagccattctgactggtgtgaggtggaatctcagggttgttttgatttgtatttccctgatgattaaagatgttgaacattttttcaggtgcttctctgccattcggtattcctcgggtgagaaatctttgttcagttctgagccccattttttaatggggttatttgattttatggagtctaccttcttgagttctttatatatattggatattagaacccctgtccgatttgggataggtaaagatcctttcccaatctgttggtggtctttttgtcttattgacggtgtcttttgccttgcagaagctttgcaattttatgaggtcccatttatcgattctcgatcttacagcacaagccattgctgttctattcaggattttttcccctgtacccatatcttcgaggcttttccctactttctcctctataagtttcagtgtctctggttttatgtggagatccttaatccacttagatttgaccttagtacaaggagatagtactggatcaattcgaaatcttctacatgataacagccagttgtgccagcaccatttgttgaaaatactgtcttttttccactggatggttttagctcccttgtcaaagatcaagtgaccataggtgtgtgggttcatctctgggtcttcaattctgttccattggtctacttgtctgtctctataccagtaccatgcagttttgatcacaattgcgctgtaataaagctttaggtcaggcatggtgattccaccagaggttcttttatccttgagaagagtttttgctatcctaggttttttgttattccagatggatctgccgattgccctttttaattcgttgaagaattgagttggaattttgatggggattgcattgaatctgtagattgcttttggcaagatagccatttttactatattgatcctgccgatgcatgagcatgggagatctttccatcttctgagatcttctttaatttctttcttcagagacttgaagttcttgtcatagagatctttcacttccttagttagagtcacgcctaggtattttatattatttgtggctattgagaagggtgttgtttccctaatttctttctcagccagtttgtcctttgtgtagagaaaggccattgacttgtttgagttaattttatatccagctacttcactgaagctgtttatcaggcttaggagttctctggtggaatttttagggtcacttataaatactatcatatcatctgcaaaaagtgatattttgacttcttcctttccaatttgtatccccttgatctccttttgttgtctaattgctctggctaggacttcaagtacaatgttgaataggtagggagagagtagacagccttgtctagtccctgattttagtgggattgctgtagattgcttttatcatgtttaggtatgggccttgaattcctgatctttccaagacttttatcatgaatgggtgttggattttgtcaaatgctttctcggcatctaacgagatgatcatgtggtttttgtctttgagtttgtttatatactggattacgttgatggatttctgtatattgaaccatccctccatccctgggatgaaacctacttggtcaggatggatgattgttttgatgtgttcttggattcgattagcaagaactttattgaggatttttgcatcaatattcataagggatattggtctgaagttctctatctttgtgggatctttttgtggtttaggtatcagagtaattgcggcttcatagaatgagttgggtagagtaccttctgtttctattttgtggaatagtttgtgaagaactgggattagatcttctttgaaggtctgatagaactctgcactaaacccatctggtcctgggctttttttggttgggagactattaatgactgcttctatttctttgggggatatcgggctgtttagatcattaacctgatcttgattcaactttggtacctggtatctgtctagaaacttctccatttcatccaggttctccagttttgttgagtatagccttttgtagaaggatctgatggtgttttggatttcttcaggatctgttgttatgtctcccttttcatttctgattttgttaattagaatgctttccctgtaccctctagtgagtctggctaagggtttgtctatcttgttgagtttctcaaagaaccagctcctcgattggttgattctctgaatagttcttcttgtttccacttggttgatttcgcccctgagtttgattatttcctgccttctactcctcttgggtgaatgtgcttccttttgttctagagcttttaggtgtgttgtcaagctgctaatgtatgctctctctagtttctttttggaggcactcagagctatgagttttcctcttaggaatgctttcattgtgtcccataagtttgggtatgaagtggcttcattttcattgaactctaagaagtccctaatttctttctttattccttccttgaccaaggtatcattgagaagtgtgttgttcagtttccacgtgaatgttggctttctattatttattttgttattgaagatcagccttagtgcatggtgatctgataggatacatgggacaatttcaatatgtttgcatctgttgaggcctgttttgtgacctattatgtggtcaattttggagaaggtaccatgaggtactgagaagaaggtatatccttttgttttaggataaaatgttctgtagatatctgtcagatccatttgtttcatcacttctgttagtttcacttgtgtccctgtttagtttctgtttccatgatctgtccattggtgaaagtggtgtgttgaagtctcccactattattgtgtgaggtgcaatgtgtgctttgagctttactaaagtttctttaatgaatgtggctgcccttgtatttggagcatagatattcagaattgagatttcctcttggaggattttacctttgatgagaatgaagtgcccctccttgtcttttttgttgactttgggttagaagtcaatcttatcagatattaggatggctactccagcttgtttcttcataccatttgcttggaaaattgttttccagcctttcattctgaggtagtgtctatctttttctctgagatgagtttcctgtaagcagcaaaatgttgggtcttgtttgtgtagccagttttttagtctgtgtctttttattggagagttgagaccattgatattaagagatattaaggaaaagtaattgttgcttcctgttatttttgttgttaaagttggcattctgttcttgtggctgtcttcttttaggtttgttgagggattatcgtcttgttttttctagggcattgttcccgttcttgtattggttttttttttttttcctgttattatcctttgaagggctggattcgtggagagataatgtgtgaatttggttttgtcgtggaatactttggtttctccatctatggtaattgagagtttggctgggtatagtagcctgggctggaatttgtgttttcttagtgtctgtataacatctgtccaggctcttctggctttcatagtctctggtgaaaaatctggtgtaattctgataggcttgcctttatatatgttacttgacttttttcccttactgcttttagtattctatctttatttagtgaatttgatgttctgattattatgtgtcaggaggaatttcttctctggtccagtctgtttggagttctgtaggcttcttgtatgttcatgggcatctctttctttaggtttgggaagttttcttcaataattttgttgaagatgtttgctggtcctttgagttgaaaatcttcattctcatccactcctattatccgtaggtttggtcttctcattgtgtcctggatttcctgggtattttgagttaggatctttttgcatttaccattttctttgattgttgtgccgatgttctctatggaatcttctgcacctgagattctctcttccatctcttgtattctgttgctgatgctcaaatctatggttccagatttctttcctagggtttctatctccagtgttgcctcactttgagtttctttattgtgtctacttccctttttaggtctagtatggttttgttcatttccatcacctgtttgtatgttttttcctctttttctgtaaagacttctacctgtttgattgtgttttcctgtttttctttaaggacttgtaactctttagcagtgttctcctgtatttctttaagtgagttattaaagtccttcttgatgtcctctaccatcatcatgagatatgcttttaaatctgggtctaggttttcgggtgtgttggggtgccctggactgggcgaagtgggagtgctgggttctgatgatggtgagtggtcttgggtcctgttagtaagattcctacgtttacctttcgccatctggtaatctctggagttagtagttatagttgactctgtttagagattgttcttctggtgattctgttactgtctatgagcagacctgggagacagattctctcctctgagttttagtgctcagagcactctctgctggcaagctctcttacagggaaggtgcgcagatatcttgtgtttggacctcctcctggccgaagaagaaggcccaaaacaggacctttctcagaagctgtgttgctttggcaggtcccagaagctgtcagcttctgtggtgcagactctcacctgtgcagactaatttcctaagttctgcagagtcctggaaccaagatggcgaccactgctcctgaggctgaggccgccttccgagccaggcggacacctgtcctctggtccggacggtggccggctgtctgcggcctgcaaagggtgctgcctcagtggctctgtgcctccacctgtcccagaagctgtccggttttgtggcgcaccctctcacctgttcagactaatttcctaggttctgcggagtcccggaaccaagatggcgacagctgctccttaggctgaggctgccttctgagccaggcggacacctgtcctcttgtccagacggtggccggctgtctgctgcccgcaaaggatgctgcctcagtggctctgtgcctccgcctgtcccagaagctatccggttctgtggcgcaccctctcacctgttcagactcctttttcttagaacaagaaaaatagtatttagttccatcaactaagtaatcttttaaacgtagaataagaagtcagtacttcacacgtcaatgaaaacagtggtcattgtgaaaaacatgatatggctggcaagacgtagaaccagctatatgcagtatcttactagcaaatgccattgttgtagaaaggctgcttgagagcgttttgttctacttgacactgaaaaatgatatcactgaagattaggttttatctgaatggtacctgatattgtgattcttgacagagagcaaaatatctgtagagatctaacagatcactgttacatgctcagcaagttaaaatttctatttacaataaagtttatctgaatccctgcccacacataagtttattcagagggaggaagatgggatttctagtaattaatgaattttggtaaggactcttaacttctcaaatcaatttacttattatacaaagagaatacacacagacagacatatatatagagagagagaaggaggaggaggaggaggaggaggagaaggagaagaagaagaagaagaagaagaagaaggaggaggaggaggaggaggaggaggaggaggagaagaagaagaatgctggataatgataaaattctactcacagggttttttttaggaaataagaaataattcttgtagcacattacagccaattatagattccagttatgttgaggaaagacacaggaatcctcagaatgggcactgtaactcaagcacacagactagccatttattatagtctcttcacttattatatggccaaatgcatgacttatccttggatatgtttttaagtcagaagaaatggttgaatcattcaaagcaaatgcagtgtagatttaaagtctacctgttgctgtatcctgtgcagaggagcaaattctccagatgatgaatatgtaaacgtgctatagtcataattatttaaaaacttaaaactagcttccagtgaagaatctatgtataataacagaggtaatctttaaaacagacactcagaaccatgactggtctttcatgtcaatgcagatccttgtgacctttaattttctatttaacaagaaatttaaaaggaagagagacagtcagctggatagaggcccaggtgtagaagccatcttcctttgatggaacaaagaaaactgtttcatgtatacgaattagtagtagtagttttagcatgatgcttaaagtttattatttaaaaatatgtgttgactgggtagttggtgagatctcttttagattaaacataaatccatcgtttgaaaaacatcgtattttatttcaagtatctaatagggctacggattttatagttgccaatgaacaccaagtttctagcacattgttggcgctcagtgtatcttaacttgactaaattgccaagtgtactatttactcttacaacaatttgaaggtcagcaggataagttgatattttctgctgtttttgccatctttgactcctaaggatccaaagagcaccatgtgtctggtgactactgccaaagtctgagaaacgctgtttctgttgaattagctttacgtgggatattagtgtgttacttgttgagcggaaactgacttttccatgcatttattggtctgtttctgcaacactttaggttcgaaaatattttccaataatgaacccctttaattaagagtctaaggctatttgtttattgatgtatttttaacttattgtaaaacaccttttctccaaaaggcatatgaaatataaaaatatgaatacatttataataaataattctgatcctctgttctaacaggaagtgtaagttaaagcattatgttataatttctcagaattgagacactattagagaaacatatgtaaatgtttaaacacagactagcttaatggttttattttcttctcaggtagagattctccgagcttcatttcccttatctctctccccattcctacaagtcacgacactctctccttccccaatccatgggataggagttccctcactacatgttgctgatggtcaatttgtgacatcccagcacagcgcagcaatctgcacacagaaattcctggggtaggaatcaacagttaggttttcccattccctcttcttctgagtcttcgttttactctcaatttacattagcaccttaccttgagaaaaataatcccttcttggtatgtcattcattggggaattaaattaaaagaatttgctttttatgatcattttatgcccagaaactcaacgaaagcagtagctcctcagagggaagcacagtagacattggggcgcctgcagaggaacagcctgtcattgaaccagaagaaacccttgagcccgaagcttgcttcactgaaggtaaagatgcgggtgacatcgcttgcagttcatacggagtacggccttttcaactgtcgatcacccaaagtgggtggcttaaatgtaatagaccttgtagagagtgaggcccacaggctagattcagtatataaaagcaatgtgaggacgtaaaagacacatcaaagcaagtccaggaaagtcacctgttagcaaactcagacaacttaggaaaccaggaacaccctttcaggagcaccacaagaatacacacttaggagaggaggtttctgtccaggtattaatttcattttgaaacccttttctagagtagctccaaccaaatgcattaatttcagaccataaaaagtcagatgcagatactagcacccaaccagtgcacagaagccagggactcccgtggttgaattagagaaaagcaggaagaagctgaggaggaggttggccccatggaagaccagcactctcaactgacctggactcccaagatgcctcagacactgagccaccaacaggcagtatacaccagctgatgagacccccaacacatatacagcagaggacttcctggtctagcttcagtgagagaaaatgcacctaacccttgagagatttgaggtcccagggagtggggaggtctggtggggtgtgggtgggcacatcctcttacatactagggtagggaaatatgggatgaggagcagtaaggggccagaccaggagtgggataaatactggactataaaaaaggattaaagaaatttttaaaattaaaataaaaaaaaagagagagatgagaaaagaacaaccacaaaaggcaaactacatgtcgttatttgtaatttacaatgagttttctttgaaggcaacattgtgtcagagaaaaggcaaaatatgaagatgctgtatgttttcattgatttgccattgcttataaattacacactttttaaaagttaaagcaaattaggaatagcgctggtggtggagggatgaagctgggctgatgcaatgtataatggaggtggtagagctatctttcatactcctattggaaccgtatgcttgcaggctgtgtccagagattcaagtgctgtcaaatcagcgtggaagaaggaagagggaaacagtggtggaacctacggaggacgtgcttccgaatagttgaacacaactggtttgagaccttcattgtgttcatgattctcctgagtagtggtgccctggtgagtgaaccttaacccaaagtgcttcagtagcaactgggaaaatctcacactctttaagcctttgtttcccattgccttagttatcaatgagtcttcaataacaacacccttttatcttcctgccagatagttaatgactagctgcatttctgggtttgcatctatgtgtgcacacacatttctaatcattcatcgatgtttgcttatcatgaaacagatcaaaaaaaacgggtcccttttgcttagtcattataaacaaagtgaatattcctctttgcttaactaaacatgactatgaggagcacatcagagttcatgttagtgctattatagtggttatatatcctctgagttctgatgaactctttgtggaagcttggtaggtcgttggggacctcttctctgtcccttttcatgtgtgttcactattcttgggctactcaggaaacaaatgatattggtaatgctaagtagtgggcaccatacctaagtgattacttaaagactggattatgtttatagaaacatgttaatttcatcagaatctatttaaatttagatgaaaattgtttacatatatacaactatattgacagaattttagatataaaaatatattgaagtcataaaataaaatgtttggagagattgataatagagaaactatagatagatagatagatagatagatagatagatagatagatagatagatagatgatatatagatttagataaatgatagaatatatacataaataaataagcacaagtgtttgcctgattaaaacacaatgacttacaagttttaaaatcaagtatatatttttctataaaattgttgatggaataactgtcttctacatatcattatctacatatctgcatatcatagacaaaaatgacttttcatcattgaaagaaatatatattagaagtaaattaccagctgaggtttatgttaggaaaaggcataggtggatctaattgaaaagtaatatgacattcctattaagtaatgtcatactatacgtaccaaaaagtaaaattatcagctagatgtggtggtgcacacccttaattccatcaggaagaggtagacagatgtttgtgagttagagccccagcctactctacaaagtgaggatagccagggctattatacagagtaaccctgtcttgtaaaacaaacaacaaacaaacaaacaaacaaaacaaacaaacaaaagaaaagaaagaaaaagtaaagaagtagaattatcaacaaaaccccaaaaaagcagttaactgcttagtaaaataaaattggacagtatattgataaatcacttattgatttaatctctctcctataaaaaaaacataataatgagagaaatttggtttttgctggaagtcaagctactggtctcacgtagacaactgttctagccactgagtcacacccacagcatagaaacaaagaaacagggtacagagctaaagaaagaattgtcaactgaggaatatagaatggctgagaagcacctataaaagtgttcaacatccttaatcataagagaaatgcaaatcaaaacagccctgagattctacctcataccagtcagaatggctaaggtcaaaaagtggaatggatacagaaaacgtggtacatttacacaatggagtcagctattaagacaatgaaattatgaaattcttaggcaaatggatgaaactagaaaatatcatcctgagtgagttaacccaatcacaaaagaacacacatggtatgcactcactgagaagtggatattagcccaaaagctccaaatacccaagatacaattcacagaccacatgaaactaaagaaggaagaccaaagtgtgggtgctttggtccttcttagaaaggggaacaaaatactcataggaacaaatatggagacaaagtatagagcagagactgaaggaaaggccatccagagtctgtcctacctgggaattcatcccatatacagtcaccaaacccagacactattgtgaatgccaagaaatgcttgctgaaagaagcctgatatagctctctcctatgaggcctgtcaaagccttacaaatgcagggggatgggggatgggataggggctttccaagagtggggaactgggaaaggggataacatttgagatgtaaataaagaaaatatccaataacaaagagagagagagagagagagagagagagagagagagagagagagagagagagacacgccatggctgcatggaatgtgacattaagaaatacatcctggcttagccaattgactcaggaaattaccatttcacttcaggaagagtgaagtcatgaagacacctcccccctctctggttttagtagctatctaaagtatatctttctctctggtttataaggataaaactcagagagtaacaaagcaatagcaatactgtatccccgttcttccatcccaaggaaataccatgtgcatatataatcagaaaaagctagctgtaagattctagtagtgtttgaaagctaaaatgtgtaaccttttctttctaggcctttgaggatatatatattgatcagcgaaagacgatcaaaaccatgctggagtatgctgacaaagtcttcacttacattttcatcctggagatgctcctcaaatgggtggcctatggctatcaaacatacttcaccaatgcctggtgttggctagacttcttaattgttgatgtaggtattttccatgtcgtgccttttgtttgagggagtttgtcttgtttgtatcccaattctaaaccaatgaatgagtctcgggccactgtgttgtgatgacaagataggctccccagccctaaactctctcacctaataatagcatagaacttacaagttctggactaatttactaactaatttaaaaagaggagataagatctagtaggaaaaccaaatttaaacaatgatattggtaatatataatgcaaatgatagaaaaagacatttaaaaggtatggtgtctattctgccatgttataaacttgaccgactccagattgggtcttcatgcacttattcattgatgttcttccccagtggtaaataatagcaagatacagaagggatggtgagcactattgtaatcttataaatctttcttatctactggaagattttacggagagatttttaagtctattacaagtaaggttacagagggtaggggaaaacaaacctacttaatgatgaggaagaaattttcttttatgtaaatgagatttacagagtccttgatgtaccaaatatccttatggagaattttagttatgaatagtgagaatttgagaatagtgagttatggagaattttagttatgaatagtgagaatttgagaatagtgagttatggagaattttagttatgaatacttaaaaacaagtaacagggccactcagtgaggccaaaatggagtgagcaaattgatggaaatctcaaaggagtcatcagttttacagaaaagagagaggaaattaatcaataggcattagcttatgctttcataactccaagtggggttaggacttggtattttgcaaattctttactcttgatattcatttatgtccttttaatattttattacttttaaacttttcatacagtgtaaatttttctacggtgtattttgcattatattgcttaccttcccccaagtcctcccagatcctcctgtcttgatatcctgacaactccattctctttataaaaagaaaaggaagaaagagaaagaaagagagagagagagagagagagagagggagggagagagagagagagaaagaaagagagaaagaaaagaaagaaggaaggaagacagacagaaagacagaaagaaggaaggaaggaaggaaggaaggaaggaaaaaagagaaataaagaaaaagaaagacagacagacagaaaggaagaacgaaggaaggaaggaaggaagagagagaggaaggaaggaaaggaaaggaaaggaaaggaaaggaaaggaaaggaaaggaaaggaaaggaaaggaaaggaaaggaaaggaaaggaaaggaaaggaaaggaaaggaaagggaagaaaaaagaaaataaaaaaataagcaataaaacacaagcaaaaacaaacaaaaaactacaacaacaaaaaaaaaaaaaacgaaaacaaccaaccactaaaccataataacaacaaaataagagcacacaaacaaaaatcaaattcgagaacatttgggtagaccagctacttctgctcttgcagactgccctgagtgtggttcatatacccagtgtcactcccttgaggaaaactgatttttctctcccagcattatcaaatagcatcttggttaggggtaaaaacttcctgctcacctcccctcccccacgctacaatttagtccagtttaaattttccacaagtcttgtccgtcaagtctgtcaccattgtgagctcatatgtccctcaccctgttgtatctggaagacactaattttcttggagtcactccccacctctagctcttaaacttttttaaaaaaaaattttattagttattttatttacatttcaaatgttatcccctttttttttgtttcccctctgaaaaccccttatcccttcccaactccccatgcttaccaacccacccactccagcttcctagccctggcattcccctacactggggtatagaagcttcataggaacagcgtcccacaaggccatcctctgctacatatgcagctggagccatgagtccccaccatgtgttctctttggttagtggtttagtccctgggagctctgggggtcctggttggctcatattgttgttcctcctagggtgctgcaaaccccttcaacagcttgggtcctttctctaactccttcactagggaccctgtgttcagcccaatggttggctgagagcatccacctctgtatttgtcaggcactggcagagcctctcaggagacagctatatcaggctcctgtcagcaagcacttgttgacatcccagagactgctccacctggggatccatcccatatacagctaccaaacccagacattattgtggatgccaacaagtgctcttaaactctttagcctcctcttccacatagctctctaaggagtgagaggaggggtttcatgaagatatcctatttagtactgagctttccaaggactctcactcagcactgtccagttgtgggtccctgttaaccatcacctactgcaagagagagcttctctggcgagggttaggtggggcagtgatctatggataaagccgttcatcattaggagtcactattgctgtgtttattcagtagaataacagaacagctatgaataaaactttatctgttgtattagttgataactgcaaattggacgaaagcggtgttattgattcattgttatttgtattgtacaggtttcattggtcagtttaacagcaaatgccttgggttactctgaactcggggccatcaaatccctaaggacactaagagctctgagacccctaagagccttatcacgatttgaagggatgagggtaagaaaaaggaaaactctgcagcgttgtatattgtcaaagctaggctgagttcaacttaactaacgaaaaacacgtgcatgcaaaaggaatggcaaccctttgcaaacttgctactttacccttttctctgttgcatatttacttcttggtgatatgcaagagaaaatcggcctctttgaaaatgatttaatatcatttatctgctttgctaattaaaatgaccttagttcataatcgatcttgggagtttccttataattcctaatacaaagggggaggggcagatactctcttaaagaactaagttgagtcatgtaataattacctagagataattttgtttcatatcgttctcctctatgacagcccatcagtacttaagggatcctatggaaagtaatgtgaatcacaaatgtgtatgaatacaaaggaaaaaatgaagaattgttaaatgttttgtctttacaatgccaaaattctcattatttgaatatatccaagggcagatattaaccattgactggagtataataatactgcctcaactgtaactaaattaatgacattgaataagtaagacactaatttaattactataaatacatacacatcttatgacaatacagctgataaggaaaaagaacatgtatttttattcattgccatacatggctcgtcaaccttaacttaaacctcggttctcagttacacagagttttatgttgctcttttgagcaaagcattattcccctctccataattcaacacgtatcagatttttgcatttattggctcattgttatgatgattatttcaaagcattatacaatcatttatagaagatgtgccgtgtgaaaattatttttttattaagatccaaaatttacgctctttaaaccaatcagatgaaatgtataaggcaaagagtgctcattgtcctgacacttacaaaccaaggctccaacaaacaggctcctctctgcaccacatagagggctttcagcctgtgtccccccataaaaacctattataaattttattatactatactgtaagaaacctgtccaatttttaatttctctagcacatatgaaaacttctcttcagtagatccaagtaagcacaaaggagctttgattctcacacaagaaatcacatttgtattaaaaatgtatcataaattttctcccaattatgcaaaacttaaatgcttttccaattaaaagagcactttcgtttcagaatagcaatttcagttgtcaaggaaaacattgtttttatacattttatataaaaatacatgagctaaatttaaattcacatttttcaactttttatggtttttttatgtttctttttctttcgcattttttaacaatccagccattacctctcctccctgtccccctcctatagtttctcatctcattcctcctcccccttgcctctgagaggatgctccctccctcactaggcctccctcttccccagggcttcaagttcctcaaggattatacacatcttctcccactgagaccaggccaggcagtcctctgcttctgcccagcctgtgtatgttcctgcttggtagctcagtctctggaagctccctggggtctgggttagttgggactgctggtcttcctatggagttaccctccccttcaacttcttcaatccttcccctaattcaaccacaggtatccagacttcagtccaatggttgagtgtaaatattggcatctgtctctgtcagctgttgttaggggctcagaggacagccatgctaggctcctgcctacaagcagcacaccataacatcagtaatagtgtcaggcctttaatgaataatgctacgtatataaggttgttagattatacttcaactttgatcttttagaatattattaaatccagtcgtttattttttatatgtaatattgactttccataacaaatgagtctattttccttttgtgtagaaataactttatcaattattgttaataatgcttttgtcaattattgttgatatgcttctcttttttaaaactggagtcatcaaaacaaaaattctgggtagatattacgaagctgactccttggtcagcttggcacatagtgagaccacaaatatctcaaggtcacggcaattcctcaccaccagtttggcattgtgaagtcaaaaccaaccttctgttgattctggtttttgtatttctagtatgagacattttctactttgtaagagtatataactgtggatggcggcgaggttgggcatgatgatgattgtaagcgggaagtgagctagagtatcttcagaaactctcactttatcctccttggcagcatagaaccgcaatcgctgtgtccgagtgtcaaccaggcagtcattttgttttgggttttttgtcactctttcaaagcatgtgcttctacgcaacactaccaaacacagcatgctgcatagtgcttgagaaggagttagaaagtaacaaacgagttatcatcacgttgccctttgtgttttgcatgtcttatgcacacttttggctgacagcttttgaacatttattgtatttcaaatttccagtccaaatttttttttcaacttgtgaaattgaacggaatgaaccgatgtcgtgaatacctagggtcaaataaaacttgtatttaaattcgtagttttaatttcccaagctgggaaaatcgtaaaaaccttttccaaagaactcaagtcttagttgctagggaaacaggcagtgagcatcatatacaaaaagtaacaccaaatgttctgtcatatcagctttctaactaataataaactatatatttctattttatataggataatcttgctccaacttggatggggtggagcggtggttcctcccctcagccctttattatgggtactgtattaccccttttgctacctttaatccttgcactgtgacttatgtgtagtgggattgagggagggagtgggaagggtacaattgcaccacagtagggacaatacaggatttatttccaaatccactacttttaatgagcttaaacttcttttgggaaaaaaaaagttatctctgacttaccatctgtggattataaccccagaagtacatatctttattacgtttcactgaatatgatttagctatttatacttcattgtccatttatggggaaattactcaattggtgagggtgggggaccctggtgtaggatgctgatgaaaacgttttcatttgtcaagctcatggtagtgacagagcatatagtccttattttttcaacacactgctctggtccctcaatgggccagtcacattccatcagttgatcgttgatgtgtgcgagcagtggctaaaggtacaacaggccaggtatctcagggttgccaatggttatgatcattctcatctttattgcataaaaatgtgttatttgcagaaagtagcaaggcaagatccctgtgaaacaagggaatacaaaaaaaaaaaaagatgtgctttaagttataaaaccaaaacatgtgaaaagtcaacttcattgaagtataaagaataggatatgcatgaaaaacaaaaaaatcatgagcactaagaaattggtgtataagccaactccttgtaagctaccccaattaacttcccagaatcttagaaggcatcacagtgcaccccaaaataaaaagccaaactgacacttctgcttcctcttaaaatgtaggagtcttggataagaaagataatttttattgtttggaagaaaaaaaaattgtttggataattgaggcatttatctatcaaaaatatttatcttaataaaatttcacaacactgatttagttgttggcttttctaaaaattttttatatttcatattaagaactcatgatttttactttccattttttaaattcttattcacatatggtttttctctatttcttagaaaagctatagaacccatggtttccggtgacttaaaaaactaatctaaatgtcttcacttagatgatactttcaaatgcactgaaatttctaatatcaacaagaatatttgcctggtcctaatttttcactgatttaataaaaagtatgaaccctaaagaagaaatagacttgaagaactggttgtgtgacaatacagaaattctgctgggagatgtccttttaaaacattgttagaagagacaacctctacaatccacccattaagcatacttctctcttagacatctccttttatgtaccttataacctcaatgtgttctttccaattgacttagaccaacacttcccagcgcatcccacatgggagccaattactgactctccctagagactgcaaagaattaatattgtagaaccaagggatggttgggctcttgggagaggcaatccgtttgtgatcttttgctctggatgttaatgaaatcgcaactttaagtggattttcagtggcaaatcctctgatcctatgccaaatgttctctaagacaaacatccttgtaaaataaatgtctcactgggccaaatctatggcaaatttgcacgttttcctgaactgcattcctatatagtatttgccatcctgaattcactaatgggcattacttttaattcaaaaccagtcccttcttcaaaggaaatctctcccatttattacattatgcaaactgctttcttatgcagtggttaaatccttagccaggcaagtatgaggactggaatttggatatccagaaccctcagaaatgtcggatgggcatagtagcttacatgtaattccagagctagaaagatgaaactagccctgtcctcaagctctgaattcagttggtgcaataaataagaaagaatccccccccccgacccctacatctctttcctctacatctatacatgtatttcccatacagctctatgcttccacatatatgctcacatatgtgcatgcacacttgcacacatatgtacacttgacacattgaagcatcataatctaacaattggaatataagaaaatatttaactttcacacagagcagtcagagaaaaccataagaggttgaaactcttgaaaaaacttgcaggataaacagaaaagagtatgagatgccaattctggtctactttctgaacctaacttgttttaccttcattagtctaattttccaaatgaaccccaagcaccaaattgtccttattgctctttccagtactaaattataattcctcaattcgaaggcaaacactctcatctttgttaaggatgtgtagagttagactcaataaacgacatgtatatttgagctaaagcctggaggagggagattatttcaagggcaagtacttggcagggagtttcaaagaaagaaggctctcaattctcagactaacaccttagcgtggagtgactgtcacagaggagggtgaagtgtatgtcaccagttagggaagctgaaaggggaaatgtatcaggcttgtgagaatccttcagcagccaagtctagcacctgagcacaatccccagaactgaccccacatggtggaaaggagaggaataattcctgcaaattttcctgtgacctccacccaagtgctatagaaaatgcatgcatgcccacatgcacacacaaataaacatagttgcaaactgttttgaggaaaataacctcacaaactgtcgagtgatgtaaatgccaaagaaagagaaatgttttctaatggctagagaaccattaaggaatttttcaaaatgggacatgggatagataaatttagtatccatactgaaagaaggcaagcaaataaaatctgataagaatgtaattcttagtaaccgaggacagagcgaagatagagaacagggccaatggccaaggtggaaaggtttgaaggaagcagcatgaaacctacagacttgtaccaaaatgttcagtgtcatgagtgttaaaagtgaaaagcttgcatgttagtatggatttcatatcctcggcagacagagcacctcactgtgagtgggagatgaagtattcagaaatgagaaacaactactcaatttcagtgttcatatctcaaatccaataaacaactttaggggtacaattttttaaaaaattacattaaaatgtttttaaatctcttcttaataatttaaaaattaaattgaaaataactttaaaaagtaatatatacaggaaagcctgtgtgctaattttttagggaggccataaagggagatagttgctcattaatttctacacatcagcctatctttggcttctgccttgatagcgcactctgaattatcttcttcatgttcatccctcatctttattgttactggtttcatttcccttggccacatagcccactattttgtattccccaatggatattgttccttacaaagttcagccagggctcagaagtacaaggaattggctcttatacttctgtcagacaggcaaaaacttctaaaattatactataataaaaatcaaagagatgatattcataattaaactaacaaaagtggcaggccccccctcccccaacatgagtagaattaatctgacgtccatgttcaagtctgaaacacacttgccaattaagagcacattagggccagcctttatctccctcttagttactaatgtgcagttcaatggtgagctatagagaaggaagccaagactaccatatgtcaaatataaaaaaaaaaaatcccattttaaatctgtagtcccgaattaaggacaagagagagggaaatatctttgacattagaaaatggagaaaatattttagcacaggactttactcagtcacatcagagttgataagtacgtatgacatccctctttttcctgttttcctgagaaaatgatctctctagtgtttcatttaagataagtttattgaattaaactcagtaaatgaaacaactgacatgactggagcttgaaataaacgatgtgatgatctactgaaatacatgatgctaaattgtcttgcttcttatgcaaaaactactattagttatagcaatgcatggataattaaggccaaaaatatattagatgttaaaaatagttttatatttatacatctgaattttaatttatatttaaagtatattggtccaatcaattcatgcccaaatgttttagttctattctttgagatactgttttgttttgggatttttttttatgagctaatctcttgcctaggagttcctacttctctctcctccttttattttttctaataaactacacatgtgtcttcatccaggagctaacttctcccattttgcttttcctttagcaccttttttatattagatttctttcttttctccatctctttgcatattgcctatatttcttttcctaagcataatatttaaaaaagactgagttttatgttaagattatttctgctttgctcttacacagataggataagtagtcttgatagaaaataaatcaatgattcctagggggatgtctttttgcttttaatcaataaggattctgacttctctttctctccatttgtgtattaggtggttgtgaatgccctgttaggagcaattccatccatcatgaatgtgcttctggtttgccttatattctggctaattttcagcatcatgggcgtaaatttgtttgctggcaaattctaccactgtgttaacaccacaactggtgacatatttgagatcagcgaagtcaataatcattctgattgcctaaaactaatagaaagaaatgagaccgcccggtggaaaaatgtgaaagtaaactttgataatgtaggatttgggtatctttctttgcttcaagttgtaagtgaacactattttctctgaaaatttttattgctcagaataataacaaagtgattattgcagctgttattttgttaggaagaaactttataatatgttttcagcattatcatctgttagtacaaatttgtgaatccagataagtgcacagaactctcaaacatgttctgctactaagtaaaaatttcacacttgactatttcgcccacctctctgttgatgagtaagttcatagaaataggtcaaatcacttttctgttcctgtaggaagtgtgtgatagacaggttctataattggtctaagccactgacacatcacccatctctctctttgatgtgaaaagaatttccgttttctgactaagatacattagtctctggtcacactcccacattttccaagagtcaatgatttaaatacaaagataaatcacaaaaatatgcgaggcttcctcattgactatggaatatatatttcaggtcctgtagcctcaaacttgtgttctaagacacatgacaaatgcctgcaagaggttagaggaggaatccctcatcaatgtgcaaatgacaagtgtcagtcctattttgtcacacttttattatgttgttaattatatttacacaatcttttcaggggttaccccatagaaaatgaatatagtgttatttctgaaaaattcttaaaagaatagcttcaggttttttctttatgcccatatgatccatacactgtaagcataaagaaaaaccttaaatactgtcaacttgatcacctagaagacgagattcccacagaatatcgcagatctaatttgttcttgctgtagacactgccaagtccacttacatttctaggactttcttccaaattgtaatagaatgttaagcttgagagttactttagagctggttggaaaataggaagttatatcagatcgccattttgttggctttctatctttttttcaaaatccaaggaaagtttgttttgaaaatagtttaaaatatttctttaaacatgtacagtaaggatattagtaagcatcagttttgaaatttaacccaaattaaggcatgcatgtcctttccaacaggccacatttaagggctggatggatatcatgtatgctgcagttgattccagaaatgtaagtattttttatatccaatgtcttctggaaatattgatttggtgcttaaattagcttatgaattagccaaacaaactaactccattttagttaattaaaaaataggaagacagtatattgagtttgtacttaacacagcagtgtctatcagagatattgtactgagttcagaaaaaaaaatggaagtcaaaaaatgaaagaaaaaattcaactctttcatttaataagcaacagatattctccaaagtgtttctatttgttgtataaaggacatagaagaatatatgactgtcttcagtagctgaactgtgtaggcaggctccatgctttgaagcctgaaaggctaaagatgcaggctaaacatcttagaaatgtgtcatagtcttttctaaatccatcctttataagaacagcacccatgcattcactggagtgtgtaccaacactgttatcacttctactttttaattccatacttttcttagctttcagatgtaccaacactgttatcacttctactttattgattccatacttttcctagctttcctatgtaccaacactgttatcatttctactttattgattccatacttttcctagctttcagatgtactcaaaaatcacaggcttcctctaagattgatctccaaaactgtaaaatctctgttttcttctttcctgttacttggttgttttttgttttttgtttttgtttttttattcttgttcttgttttggttttcttcggtaacccagacctctagcttactatggagacaatgataaatttgaaatcgtcctgttcccctacaaacttcttgatcacctctggaattgcatcatctcaccttgttgcatagagtttgtcttagatgttcagttaattttagctgttgtctttaaaaatagaagactgcagtagttacctatttatactaaatattgactccattgttatgcattgagtgacagccctgtgtctatttttataactgcaagtctgagagtcagtcgtcaatggaggattttataaaataaatcattgaacgtgtctattcaatccaaaaattttaatgactttgttactggtagggcaagatgccagcatccaaatgaatacttcagttccttcatttgctatataagttcatacacaagtgaatcttgactataaaagtgtcctctctatatttataagagctaatttttcactaactttttctttggttgttttaaagacaggatgttgcattgtggcccaggctagaatagtactcaacaagtctccagcctcagcttcccaaattctggagttgcacagacataagacaccacactagtattttcaaattactgaaaatcaattaacttaaaacttaccaaatctaaagtctattatccaaataacagaatgtcagttatactatgtaaaattatgcaattagtgttagagtgacgaattgcatcactttttacacaaaaactttttgcttcctagtttcaaggatggtttttggttttttgtttctttgaggctgttgatatgggaataaaatacactaaattatttctaagaatatatatagccttctactcttgtgtagaagcaccgacttgctcccagtattcaaactgctttatcagttaacaaattccctccgttggcaggttgaactacagcctaagtatgaggaaagcctgtacatgtatttgtacttcgtcatcttcatcatcttcgggtccttctttaccctgaacctgtttattggtgtcattatcgacaatttcaaccagcaaaagaagaagataagtatttttacaatttttcctaacacaaggaatcagagtaattaacattctatttgaattggaattcaagatgagatcttgaattcagaaaccaaatagctcacgaccttttccctatgttttatccttaataactcctcactcactcccctttataaggtattcgcagctaaaagatcactagaggctggaaaagcatgtggaaaggtgagggaaaaggggttagatttgatcagagaacactggcatgtctgtactacaatatcacactaaatcccatgattatacatagtcagtaattatccatcatttaaaatacggttcagtgtatatacttcttttgtactcttttctacctgtacttctttcttctggttatttaattaatagcaaccacttctagttctaatttgaggaatttttgttttatctattatcattcttaaggcatgtttgattatttcaattatatatgtgcactaaaggaagcatgcaaatattatcactcagtagtaacaatggtccacatttcatctttgtctgctcaaactctttccatgaacagtctccttttttgaactacttctcatctgtttttttcttttaagatggtctcacttttcaatctaggctgacctgatctcactatatggccctatgtgacctaaaacaagtagcagccctgtatccttctcaaataaattggaactatagtcacatatcacgttgtctgaccctgaaatattctgtgtacatatgtggctctgtgtgtgtgtgtgtgtgtgtgtgtgtgtgtgtgtgtgtgtgtgtgtgtgtgttgtgtgtgtgttgttgtattgtgttgtgttgtatgtgtattcgtggtggtgtgtgcaagtgtctgtgaggatgaatgtacacatgcatgtaaaagccagtgataaacattagtcacctttctcaatcactacccaccataatttttaagacaggagttctcattgaatctcctcttcaattcagattgatggctggccagtgagattaatggattcatcttatctctgcatccccatcaccatttggtttttgttttaataacatagtgccatgcccactttaacatgggggttgggatctgagcttatattcacgccaatgtgtaataaatttatcacttcagccatctctgaaatactttttaaaattacagttatttattcatgccacactgggtgtgtggtagtcagtagacaacttacaggatatggtctccctccttccaccctttgagtcccagggattgaatccaggtgatttggattgtaagcaaatgcctatatgcactaagccatggtcccagccctgaaatgtttcccaatgtacaattttaaatacttttatcacagagatttctcagtttgttaaaagtgttcatgtttatttatcataacttggccaatttcaatctatctaatctttagtgacttaagtaattttttcctgcaaaacatttgagtgtttaaatcttttcttacattaaattccagagtgaagtatattgcctccttgtagttaaataactagtcaactgaataagctatgtgagcatgaccttgctccaccactctcacagacaccagacattccctttagttgttaatatttgacatctcttaaagggaaacaaaatttaactttattttttgtgcattttatggcaaatagttttggatgtatccaagttcatcccagccaattatatttctttatgtcccatgatttcatactatttgttcgttgcattcattttttatttattatgattaacataaaggagtattggatttgtcaaaggttttctcagcatctaatgtgatgatcatgtgatttttttctttcagtttgtttgtatagtggattgcattgatagattttctttcatatattgaaccatccctgtatccctgtgatgaaaggcctacttggttgtagtgaattatgtgtttgacgtgttcttcaatttggtttgtgaatattttatgagtgttttttgcgtagatgttcataagtgaaattggtctgaagttttcttcctttgttgagtctttctgtggtttaggtatcagggttactgtggcctcatagaattaattaggtagtgtttcttctgtttctatttttggaagaatttggggagtactagtattacactgatggattcctacatattgaaccatccctgcatcactggtatgaagcctatatgatcatggtgatgatgtttttgatgtgttcttgaattgggtctgggagaattttattgattatttttgtatcaattttcattgacaaaatggttctgtagttttctttctttgttgagtctttgtgtaattcaagtatcagagtgactgtggccacatagagtgaactaggtagtgtttcctctgtttctatattgtggaatagtttgaggagcattggtattctggtagaattctgcactaaaaccatctgaccctgtactttttttggttgggagaagtttaatgcctgcttctatttccttaggggttataggaatgtgtagatggttattcttatcctgatttaactttggcacctggtatctgtctctatttcttcctgaccaagttagtgatcattgagtatagagttattcagtttccataagtttatgggctttctgttatttctgggtttttgttgttgttgttgttgttgttgttgttgttgttgttcttttttttttttaagtctagccttaatccctggtgacctgatacaatgcaaggggtaatatgaatcttcttgtatctgttgaggcttgctttgtgcccaattatatggtcagctttagaaaatgctcatgaagtgctgagtagaagccacattctttggttttggggtggttatttagatatctgttaaattcatttggttcataacttctgttagtttcattgattctctgtttagtttctgtttcaatgacctgtccattggtgaaagtgggatgttgacatttcctactattattgtgtagggttcaatgtgtgatttgagccttagtaaagttccttttacaaatgtgagtttccttgcttctggggcatagctgttcagaattgagatgtcatcttagtggattctccctttgatgagtatgaagtgtccttccccatctcttttgccaattttggttgaaagtctattttattagctattaaaatagctactccagctggtttcttgggttcatttgcttggaaaactttttttgaggcctttattctgaggtagtgtctttttttgttgctgaggtgtgtttcttgtatgccacaaaatgatggaaattgtttacgtgtctgttagcctgtctttttattggtgaattgagtctactgatactcaaatttatcaatgaccaatgattgttagttcctcttattttgatgttagtggtggttctgtgtgtgtgtgattctcttcttttggttttactgtaagatgattaatttcttgtgctttcttgggtgtagttactcttcttgtgttggagtttttcttctagtatccattataggatgtattagtagaaagattctctttaaatttgggtttgtcatagaatatcttggtttcttcatctatgatgactgaaagttttactgggtataatagtctgggctgctatctgtagtctcttagcatctgcaagatcttctgacttttagaggttcgttgggaagtcaggtataattctattaggtatgcttttatatgttacttggcccttttcccttgtagtttttaatattctatcttttattctatatatttagtgttttaatatgtggaaggaaaattttcttgtctggtccaatctaatgatgttctgtaagcttctatagtgatccctttctttaggttaggaaagttgtcttctatagttttgtttaagatattttttagccctttgaactgggaatcttcaccttcttttatttctattattcttaggtttagtcttttcatcgtatcacaacttcatgaatgttttgagttgggaacttttttcatttggcattttcctttatcaatgtattaatttttttctattgcatttcctctgtctgagattctttcttccatctcttgtattttgttggtgattcttatgtgtgtagtccctgctctctttcctcagttttatatctccagggttgcttccatttgtgttttctttaatgcttctaattctatttttaaatctgagtccattttattcatttctttcacccgtttgattgtatttttcatatttctttaggggatttatttgtttcctcattaaagatttctacctgtttagttgtattttcctatattctgcatatgctttatttatatcatctttaatggcctctattgtcttcataagatgggatttaaggtcaagtattgctcttcaggtgtgttaggatatccagggcttgctgtagtaagagagctcagttctgaaggtgccatactgcactggcttctagcgattattctattgttctattgagcttgcctttcgccatctatttttttctctggtgttggctggcctgtaagtccttgggagtagtaactctcagagacttgttgtcctagatagctaaagccctccccagaggcaagcagagctgttggctgaggtgtagggtatagatccccaattgcaggtagaggtgtggactgaaacatggagctggttgttctggtgggagaagaactcccatgaggcagacaggttgtgaaggagagctcagggtgctggtccctgactgtaggtggaagtgtgggccagaaggaagatggagctttgtgttttaccatgtctgggcttttttccttcaataattataataataatgccaattttagttatcttaaaacttaagtattatagtcaatacagtgtacttttaattttcaaattcaaaataagtcacaaggataaccatgttaatctcttgaaatctcttgttataatattgaaaagttatgagggaatggatacaattttaaccagctttgatttttttttctatactttggaggtcaagacatctttatgacagaagaacagaagaaatactataatgcaatgaagaaattaggatcaaaaaagccacaaaagcctatccctcgacctggagtaagaaatatcaaatgaaaataatataaagcaacaacctgaaatgagttttgtttctcaggggaaatcaactaccattcccagcacaaaagaaaaaagaaaaaagaaaaaagaaaaaggaaaaaaaaaaccttttgagtatctctaatctatgttttgatattttttttaaagaccaaaaagaataagaatatacagaaaatgcaaatttgtctccaaatgacctacaactacacacttagaatccaaactacgtagactaatgtggtcctcacaatagttgtgtctttatgactttacagtagctgcagtgcaatgtcaagcaatacagaagcatagggtggggctaatattcatttactttctgattaaagaggtagaaaagatgctcaatggcatatcatctccacttgtaattgttgtttaataagtagaaatatggaccattttagaggaggtgagcatcccagtaatgaatatgtttttgtatggctctaaaatcagcaattgcttatgtcggcattattacaatttgtgataataaataaccattctcatatttccaagattcatctacaaactataaaggagaaagagcccttatcatggttatttttatgacagtgatttttttccataacttatttcttttattcacattatatcccaatcacagcctccctccctcctctcttcctagtcccaccatcacaacaaatccttcttcctattgtcccctccccttgtcctcaaagaaggggatcccccttttataccactccaccatgggacatctagtcccatcagaactagacacatcctctcccaccaaggactaacctggcagtctaggtaagaggagggggctccagtgacaggaagcagagactgagacagcttgttagggaacccacatgaagacaagctgcacacttgctacaaatgtgtagggtacctagatccagctccaccacgctccctggatggtggcccaggctttgtgagtctccacggtcccaggatagttgacactgtaggtcttcttgtggtgtccttgactatggcagtgatcttaagcttaaaatattccccatgatgaattacaaaacagaatcttagtgaatgtttctattgtactagccaattttgtttgtttgtttgtttgtttgtttgtttgtttggaggcagggtttttctttggagttttggctgttgtggaactcacactgtagatcaggctggtcttgaactcagatccacctgcctctgcttccccagtgctgggattaaaagcatgctctactactgtccagttcaagcactactttctttctttctttttttaatatttttattaggtattttcctcatttacatttccaatgctataccaaaagtcccccatacccccccccactcccctacccacccattcccactttttggccctggcattcccctgtactggggcatataaagtttgcctgtccaatgggcctctctttccagtgatggccgactaggccatcttttcatacatatgcagctagagacaagagctccggggtactggttagttcataatgttgttccacctatagggttgcagttccctttagctccttgggtaatttctccagctcctccattgggggccctgtgatccatccaatagctgactgtgagcatccacttctgtgtttgctaggccccggcatagtctcacaagagagagctctatctgggtcctttcagcaaaatcttgctagtgtgtgcaatggtgtcagtgtttggaagctgattatgggatggatccccagatatgtcagtctctagatggtccatcctttcgtcacagctccaaactttgtctctgtaactccttccatgggtgttttgttcccagttctaagaagaggcaaagtgtctaatgagaacattttccccattgatacttagtgctacacaagtcaagtactgcacagcaggggtattttatggtactaaaatatgcttaggattcttcagtggcccaaagaaataagcagaagatggtgtactgggcctaacctcagctgactacacatgagtagcgaaggacatgtgctccctttgttatagcatagcaagcaatgtcttttcagtctgattacccctgtggagactcatcattatttgtctgacaatatcagcaaagaccacttgctgggaacaaattaatgttgtcaaggtgaaatgtaaatttattttattttattttattttactctttgagacagggtctctctgtgtagccctgactgacctggaattccctttgtagaccaggctggctcagaaatccacctgcctctaccccccaagtgctacttgcccagcaggaatgtaaatgtttggtgtttcagatgcatccttgaaatcacaaggttcctttgataattctctaggaacaaagcaaatttaagactaatatttattacgtttataaatgaccacattgtctagctgctcattggaaagtactacagccagtgagccaaagtttggcaacagcaaatcaaacagatttcttacagttctgtaaccttgatgtgttgaaattcactgtgtgtttctgtaaagagtgtgcagggaaagaatctacagcaagggattgatgtattcaggaatatgcatgcctcaaaacaaaaatttaattaactagatataaaaatgttctacaaggcaccaattacaaatatttgtcccaataggtaggtactatgtacaatactagaaagtagggaatataggaagtatttaatgtatatgctgtctaccaggaatctcccgcattgctgaaagtgtctttgtttctctgcagaacaaatttcaaggaatggtttttgactttgtaaccagacaagtgtttgatatcagcatcatgatcctcatctgtctgaacatggtgaccatgatggtggaaacggatgaccagagcgattatgtgacaagcattttgtcacgcatcaacctggtgttcatcgtcctgttcaccggcgagtgtgtgctcaagctcatctcgctccgccattattatttcaccattggatggaacattttcgattttgtggtggtcatcctctccattgtaggtaagatctgtgcaaagtctggcaaattcctcctgataaaagtggaggttgaaaacaggaatttagagtggaaggcatctcactactcaaagtcaatatgttggcatgtgtttttgagttgtatttgtttttcttccaaaattaggcttctaatttatacaaatattttatcccattgcatcacatatttatttgaccattaataagatctcctttattgagatatattaaatagattgatgtggtgaaccaaaatttaaaaagtgcttttaggtggttgagattaaacactctatacgctatccagatcaatgattctcaatctgtaggtcgcaacactttggggattgaatagccctttcataggggtcacctaagaccattagaaatcataggtatttgcattaagattcatagcagtagcaaagttacaattattaagaagcaacaaaataactttatgattggtggtcaccacaatatgagaaactgtattaaagggttgcagcattaggaaggtttagatccactgatctagatgattctggtaagaggggtactgagaatctggtctgaaggtcaggaaagacattacattagagatgtagttaatggggtcaccagcatgcagagtagaacatggatagaagtaaatgggaaatgcaagtagactaacagtagtttcttgtggctttcatacagaaattttcaatatttccagaaggaaactggtagcatggaacatctctttcttagtcctatcctacaaattgtgtagtacataagagcctcatgaaggtaactcatctcactgcagataccaacaatgcttcagagaagtgaagaagtccctgtatgggaacttcattcctaattaagatgaaatcattgcaaattttcaagcataggactcagttggaatgatctgtgtgctattcccccctctgaataaataggccttacatctaaaatccaacccatatgttatatgtaatttttaattccaacaataatcatgtaaatagcatcaaaaagagagaggccgaaagagacagagatagagactgagatagagaaggctgactaaagagaatgatgcttttgtgctttgcatacaatgatgcatttgggtattttggttggttgaataggtaggtttttgttgttgttattgctgttggcagtggtggtggtgatggtggtggtggtgatgatggtggtggtggtgatagtggtggtgatggtagtggtggtggtggtggtggtggtgtgtgtgtgtgtttgtgttggaagtactctttaatggagtctttatttaaaggacagaggggggagctgagaaatgcagtggcatctaaagcacttagtgtgcaagcttgagaacgagagaacagattcccagcaccagtgtaaatcctggccaagggtgacaccttataaagaaggctcttggaacccctcaaattatctggcaagctaccagagagctctgtgttcaattgagaagtcctgagcacagagactgcaatggaggagttagggcaaggactgaaggagctgaaggggtttgcaaccccacaggaggaacaacaatatcaaccaaccagagctcccaaagctcccagagctcccagggcctaaaccaccaaccaaagagtacacatggagcatggctccagccacatatgtagcagaggatggccttgtcattcatcaatggaaagggaggcccttggtcctgtgatggctcgatgaccccgcaaaagaaatgctagggccctgaggtgggagttgatgggatggtgggggaacacccttatagaggcagggggtttgggaggggaaaatgagaagggggataacatttgaaatgtaaataaataaaataaccaataaaaattttaaaaattgaaaataaatacataaagtagaaagcaatcaaagagactcccagcatcagcctcaggtaagacacacacacacacacacacacacacacacacacacacacacacacactcacgagagagagagagagagagagagagagagagagagagagagagagcacatgccacatgaacatacatgtgccaaaaaacccaaaatcacagggagaaaaaaagctgtaaaaattaaaaaattgagattttgctacaggagaggaaaagaacatcaaccctggagtgttttgcaaacacacaggcacatgcacggacaattctgtaataatattagttcatatgaggatgaaaacagcatgaaacactccaagacttcagattagtgaagtgtgaaaaagaaaagtttggttcaacaagtttagagaaaaaacatcatattcatatattgttggctgttgacattgaagcaaattttcgtatttatttctgatgagattttaagttaaccatagcatatcaatactcttcgggccaggcgtggtggtacatgcctttaatcccagcacttgggaggcagaggcaggcagatttctgagttctaggccagcctggtctagactgagttccaggacagctagagctacacagaaaaaccctgtctcgaaaaaccaaaaataaataaataaataaataaataaataaataaataaataaatgctcttgggggggcgagctgtactatgattcttaaattttaatctattgctgaggctgagtaaaagctaaagttaacttttattatacatcgtataattctataaacactcagttttccatatgtatgtattaaatatctgaaaattcaaacacagatcaaaagtatttttaagaaccatgctcctctcctgaccatttttaatataatgaacggtagcaactgttctgttttggattttttgtttttgtttgtttgtttgtttgtttgttttcttgttggttggttggttggttggttggttggttggttggttggttttaatttggtttggtttttcaagtcagggttcctctatgtagccttggctgtcctgaaactcgttctgtagaccaggctaccatcacactaacagagatcccctccctctgcctttgagtactgggatccacctccactcagccttacttggtttttgttgttgttgttgttgttgttgtttagttaggattggatttctggaatatcacagcaactcttcacatggtactttcattgttaaatgtgatgaacattttaaatataattcaaaactttcaataaaatggtatagacaaattgtatgcaaatgtgctgccatatgatataaagggctttcagtccttgaattttgatgttctaaggaggagaggtgcatcctgggacaaatcagctgcagatactggaaaatgattggaatatatttgtaccatacccaagattacaaaattgaatcttaatactctgaaattgacattggaactttaataactcaaatattttaataaatgattagttgatgacttcttcactgattgatagtttaattatcttcccacagggatgtttcttgcggagctaatagaaaagtattttgtgtctcctaccctgttccgagtcatccgcctggccaggattggacgaatcctacgcctgatcaaaggtgccaaggggatccgcacgctgctctttgctctgatgatgtcccttcctgcgctgtttaacatcggcctcctgctttttctcgtcatgttcatctacgccatctttgggatgtccaactttgcctatgttaagagggaagttgggattgatgacatgttcaactttgagaccttcggcaacagcatgatctgcctgttccaaatcaccacctctgcgggctgggatggactgctggcccccatcctcaacagcaaaccccctgactgtgaccctaataaagttaaccctggaagctcggtgaagggagactgtgggaacccatctgtggggattttcttttttgtcagctacatcatcatatccttcctggttgtggtgaacatgtacattgctgtcatcctggagaacttcagcgttgccacagaagaaagtgcagagcctctgagtgaggacgactttgagatgttctacgaggtctgggagaagttcgaccctgacgccacccagttcatggaatttgaaaaattatctcagtttgcagctgctctagaaccccctctcaatttgccacaaccaaacaaacttcagctcattgccatggacctgcccatggtgagtggagaccgcatccactgcctggacatcttatttgcttttacaaagcgggtgttgggtgagagtggagagatggatgctcttcgaatccagatggaagagcggttcatggcttccaacccctccaaggtctcttatcagcccatcactactacattaaaacgcaaacaagaggaggtgtcagctgttatcattcagcgagcttataggcgccaccttttgaagcgaacagtaaaacaagcttcattcacatacaataagaacaaactcaaaggtggggctaatcttcttgtaaaagaagacatgctcattgacagaataaacgaaaactctattacggagaaaactgacctgacaatgtccacagcagcttgtccgccctcctacgatcgggtgacaaagccaatcgtggagaaacacgagcaggaagggaaggatgaaaaagccaaagggaaatgaacaaaaacaacaaaaaaaaataataaattgggtgacaaattgtttacagcctgtgaagtcaaaaggactcctttaagaagtcaatgccaaactgactgtttttacacaaattcactttaaggtcagtgcctcaataagacagtgacccccttgtcggcaaactctgtgactgtgtaaaggggagataaccttgacaggagggtactgttctaactaccagctgacactgctgaagacaagagacaaatggctatgcagactgtagggatcagtctaaaggggtgcagagctataatttgggggttaatgtgaaacactttagtgtagtaactctatccaccgtttgcatttcaactgccacatttgtcaggttttttacaaactctgttagtggattcatcttttttttaatccatgtgttgtttgttacatgtgactatttttgtaagcagggtttctgttgggaaatagactaaaggaactcttttcccggtgtgtcacctgggagtgttgacatccttatggccctcccgtctgcacaacggtgtggtttcgcatgagggcatgttgcaccttaggatcatgcatgagaaaaagtcgaaaggaaagcaaagacagttcttcaacagttctatgtcatctgtgtttctgcggggggagggggcggtacggaggtgatcgctagatcgtgggctttgctgagctgggtttgtcaaaatctagtccttagtccaaggagattgttcagacaggtcatcaagtcttaggaggtgcaaacttcattcaaatgtctggagtcacgctacatttctgttcactgtctctgaaaggtctctaaattatgactctgactccctacccccaaccctagcagagcgaattgaccaaaagaaccctttataaatccccgcttcctcctgcactttgtttagccatcttcagctctcagcaaggttgacactgtatgtgttaatgaaatgctatttattatgtaaatagtcattttactctgtggtgcacgtttgagcaaacaaataatgacgtaagcacagtatttattgcatcaaatatgtaccacgagaaatgtagagtgcaagctgtccaccggaaatatactgtactctgtaccattgtagatagtgtggatgctgccaatgcatgtcgatattaccacgttgcggtatctagtttctctcagcactcagaatctcactcacgagaaaccataggtcagtggctaagtcaaggaaactgttcagcagacttcatttctttaagtcattaagcaatagtttgcagcactttaacaatgtttgggttgtttttaaaatttaagtggataacgttcaatgtatagccagactgtacatacgtgttcaaaagacaacactactgcttaacctgttaaaaacatgtttagagttttataagcaaatataaatactgtacaaagtcactttcttttacttttcagcattatgtacatatgaagaggaaattatcttcaggttgatatcacaatcacttttcttactttctgtccacagcagtttttcatggaagatatttgctaactaagaaatgaaactatgactgggtagtggtagatctctgcttttttattacaattgttaattttggattatttcataattttaaggggcaaaatacactcacaacttcacatccaaattatgatttgcaattggaaaaggtataacatttgatttatatttattgtagtgtttgtgctaacagatgaccagagtgcttttttttctcatttttttctttatttccccaatttctgtttatttttctttgctttgaaatcatgcttctttagattgttctaaatataaatgtgggcttcagaatttcttttcctcaaaatcagagaggattacacttatatagtcaattacatcaagatatttgtgtttcttacagaagcagaccgtaggcacctctttttcttaaaaaaaaaatatttaggcaaaccgtattcatgaactgcatgttggaaaatgctactattagcccaaaatgatgctaatcacaattaaaaaatgtgcaaatctaataaaattaattttttattttattgcttgcctggttactttttgttgaccgaattttatgacaatatagaggtgcttttatctacttatggtagggagagttgcacacagacacacacacacacacacacacaccaatctttaagcactattactgggcagatattcatctattctaacccttaaactatctacttcccagccaaaggccccatgttccttgcagtttggatctcactggcttgctctgttccatgtgtgtcctcgtggagaatcccttggcaacctgctcattatgactcctcctggaccctctgactcatggccacctcccccttcttttcctcatggtccttcttttacttctgtctacttgggatcccctggctgggatcattagtccagccttctatctcctctgcccagccataggctgaatctgctctttattgagcaatcaaagatgagggaaaacaaatttttgtataacattgagatcagagttgccttggtgagatggctcagcggttaagagcattgactgctattcctaaggtcctgagttcaaatcccagcaaccacatggtggctcacaaccatctgtcatgaggccctcttctggtgtctaaagacagctacagtgtacttatgtataatatttttttttccattttttattaggtatttaactcatttacatttccaatgctataccaaaagtcccccatatccacccacccccactcccctgcccacccactccccctttttggccctggtattcccctgtactggggcatataaagtttgcaagtccaatgggcctctctttccagtgatggccgactaggccatcttttgatatatatgcagctagagtcaagagctccggggtactggttagctcataatgttgttccacctatagggttgcagatccctttagctccttggctactttctctagctcctccattgggagcccacttatgtataatattaaataaatcttttttagaaagaagaagaagaaagagatcagagttgcttaaccatgccaacttttggactgtagacagaagtctggacatagaaatcaacatctgaatatatataggctacaagaccaacccccagtacaccacacacacacacacacacacacacacacacacacacacacacatacacacacacacacacacacacacacaatagaacagaaaacttaaaagtaaaaattggacttcctagaatggcccctcagcagctagcagtagcaagatggaatctctaagagaaccaggagccaggactaacacataaactaatatccacgcaggggaggggagttatccaactcaacgcaacagggatggccacttgagatacataaagaagcctttaaagcatcactgatgaattcaacgttgctaagagtgggccaccatgttcctccagaagctccccacaccctctctgtgtttcttctgagaaagaggacctctgtacacatgtatatgttccgccgtcctttagttcccagttcgcttagccaatgggaagcctgggctggacatcaatacaaaactgtgagataggaatatctatccacctgttcctttcttgcaggtcttcttactccctgaaagtcagcatgccccgtcttacaactggagcaactttctgtgaagcgtcatagccatccttcttctcccctcgctttcttggatctgaggatgcttccttcctccttacgacttcccctatagttgctgacagcggtgaaaatgatttctttatgaagacctctctatgcctcattttaccatgccatgtgtcccttgccaggcagaactagctcctcaaagccagcaagaagcaatgattcaccttaggttggcttggagactttatctaactgactttcacagtcacagaacatgtcactgagagaaatacagcatggttacgcttggaattcacagacatggagagcttattagagtggttcaggtagcaaaactgaccatctaattatctgtgtgtgatggttagtatatgcttggcccaggggtgacactatcaggaggtgtggccttgttggagtaggtgtgtcactgtgggtgtgggctttaataccctagtcctagcagccttcagatgaagatatagtaccctcagttcctcctggacaatgcctgccttaatgctgccatgctcccaccttgatgataatagactgaacctctgaacctgttagccagccccaactaaatgttgtccttataagagttgacttggttatggtgtctgttcacagcagtaaaaccccaactaagacactgcatctctaagaaaaaagaaactttcatttaacttcaggattgtaccatctcagtcatgaaaccagaaagggcaacaatagttttgaccagaaaagagtaggccagtgatttttccacctttctacatctttctgaccatatttgtttacaatagacatgcaacgtaagagggcaactccaatttacaagttaaaagtttcattttcaaagaaagacaattagaacaatgagcttatacaaggtctcattggtacttttcttcatacaaaaagaagaaatagtgaaatataagcctacaaatcgtcctcatattttgtaatatatgctatgccaaaaagtaatttatgtacagagaattatggggtcttgtaactaggatggaagaagcatctagaatatccatgtcataggctaaatctgggacaagcagaccacccaaatagaacacaacacat

SEQ ID NO: 4-12 - skipped (9 entries)

SEQ ID NO: 13 - DNA, 64 bp, Homo sapiens
gataatcttgctccaacttggatggggtggagcgctggttcctcccctgagccctttattatgg

SEQ ID NO: 14 - DNA, 64 bp, Mus musculus
gataatcttgctccaacttggatggggtggagcggtggttcctcccctcagccctttattatgg

SEQ ID NO: 15 - DNA, 23 bp, Artificial sequence
  Primer
ccaagaaggctggaatatctttg

SEQ ID NO: 16 - DNA, 19 bp, Artificial sequence
  Primer
gccaacttgaaaactcgca

SEQ ID NO: 17 - DNA, 27 bp, Artificial sequence
  Probe
accaggctaagcgtcacaataaaaccg

SEQ ID NO: 18 - DNA, 23 bp, Artificial sequence
  Primer
ctatacctcgaccaggaaacaaa

SEQ ID NO: 19 - DNA, 24 bp, Artificial sequence
  Primer
tgaccatgttaagacagatgagaa

SEQ ID NO: 20 - DNA, 29 bp, Artificial sequence
  Probe
tgtctggttacgaagtcaaagaccattcc

SEQ ID NO: 21 - DNA, 21 bp, Artificial sequence
  Primer
agccctttattatgggtggtt

SEQ ID NO: 22 - DNA, 24 bp, Artificial sequence
  Primer
ccagaatataaggcaaaccagaag

SEQ ID NO: 23 - DNA, 25 bp, Artificial sequence
  Probe
tggatggaattgctcctaacagggc

SEQ ID NO: 24 - DNA, 23 bp, Artificial sequence
  Primer
ccctaagagccttatcacgattt

SEQ ID NO: 25 - DNA, 20 bp, Artificial sequence
  Primer
ggcaaaccagaagcacattc

SEQ ID NO: 26 - DNA, 24 bp, Artificial sequence
  Probe
agggtggttgtgaatgccctgtta

SEQ ID NO: 27 - DNA, 18 bp, Artificial sequence
  Primer
gctcaagctcatctcgct

SEQ ID NO: 28 - DNA, 19 bp, Artificial sequence
  Primer
agctccgcaagaaacatcc

SEQ ID NO: 29 - DNA, 27 bp, Artificial sequence
  Probe
ttcgattttgtggtggtcatcctctcc

SEQ ID NO: 30-35 - skipped (6 entries)

SEQ ID NO: 36 - DNA, 20 bp, Artificial sequence
  Primer
ggcaaattcaacggcacagt

SEQ ID NO: 37 - DNA, 20 bp, Artificial sequence
  Primer
gggtctcgctcctggaagat

SEQ ID NO: 38 - DNA, 27 bp, Artificial sequence
  Probe
aaggccgagaatgggaagcttgtcatc

SEQ ID NO: 39-40 - skipped (2 entries)

SEQ ID NO: 41 - DNA, 18 bp, Artificial sequence
  Synthetic oligonucleotide
agttggagcaagattatc

SEQ ID NO: 42 - DNA, 18 bp, Artificial sequence
  Synthetic oligonucleotide
aacagttccatgagtttc

SEQ ID NO: 43 - DNA, 18 bp, Artificial sequence
  Synthetic oligonucleotide
tggaggaacagttccatg

SEQ ID NO: 44 - DNA, 18 bp, Artificial sequence
  Synthetic oligonucleotide
ttaatctggaggaacagt

SEQ ID NO: 45 - DNA, 18 bp, Artificial sequence
  Synthetic oligonucleotide
gaagtgttaatctggagg

SEQ ID NO: 46 - DNA, 18 bp, Artificial sequence
  Synthetic oligonucleotide
acccctgaagtgttaatc

SEQ ID NO: 47 - DNA, 18 bp, Artificial sequence
  Synthetic oligonucleotide
tccataacccctgaagtg

SEQ ID NO: 48 - DNA, 18 bp, Artificial sequence
  Synthetic oligonucleotide
ccagcttccataacccct

SEQ ID NO: 49 - DNA, 18 bp, Artificial sequence
  Synthetic oligonucleotide
gcttcctccagcttccat

SEQ ID NO: 50 - DNA, 18 bp, Artificial sequence
  Synthetic oligonucleotide
tagtaaaagctcagcttc

SEQ ID NO: 51 - DNA, 18 bp, Artificial sequence
  Synthetic oligonucleotide
aagatgtagtaaaagctc

SEQ ID NO: 52 - DNA, 18 bp, Artificial sequence
  Synthetic oligonucleotide
taccatttattctgcata

SEQ ID NO: 53 - DNA, 18 bp, Artificial sequence
  Synthetic oligonucleotide
gtcatcctgcacatttta

SEQ ID NO: 54 - DNA, 18 bp, Artificial sequence
  Synthetic oligonucleotide
aggagtcctgttgataaa

SEQ ID NO: 55 - DNA, 18 bp, Artificial sequence
  Synthetic oligonucleotide
ctcctaaaggagtcctgt

SEQ ID NO: 56 - DNA, 18 bp, Artificial sequence
  Synthetic oligonucleotide
agtttggcattgacctcc

SEQ ID NO: 57 - DNA, 18 bp, Artificial sequence
  Synthetic oligonucleotide
gcactgaccttaaggaga

SEQ ID NO: 58 - DNA, 18 bp, Artificial sequence
  Synthetic oligonucleotide
cttattgtaggcactgac

SEQ ID NO: 59 - DNA, 18 bp, Artificial sequence
  Synthetic oligonucleotide
cccctttacacagagtca

SEQ ID NO: 60 - DNA, 18 bp, Artificial sequence
  Synthetic oligonucleotide
aacagtaacctcctgtca

SEQ ID NO: 61 - DNA, 18 bp, Artificial sequence
  Synthetic oligonucleotide
gctggtagtgagaacagt

SEQ ID NO: 62 - DNA, 18 bp, Artificial sequence
  Synthetic oligonucleotide
cagtgtcagctggtagtg

SEQ ID NO: 63 - DNA, 18 bp, Artificial sequence
  Synthetic oligonucleotide
gactagccattgtgcatc

SEQ ID NO: 64 - DNA, 18 bp, Artificial sequence
  Synthetic oligonucleotide
cagtctgactagccattg

SEQ ID NO: 65 - DNA, 18 bp, Artificial sequence
  Synthetic oligonucleotide
tccctacagtctgactag

SEQ ID NO: 66 - DNA, 18 bp, Artificial sequence
  Synthetic oligonucleotide
aactggtccctacagtct

SEQ ID NO: 67 - DNA, 18 bp, Artificial sequence
  Synthetic oligonucleotide
gcaccccttgaaactggt

SEQ ID NO: 68 - DNA, 18 bp, Artificial sequence
  Synthetic oligonucleotide
aggtttgcaccccttgaa

SEQ ID NO: 69 - DNA, 18 bp, Artificial sequence
  Synthetic oligonucleotide
gatacaattactacacta

SEQ ID NO: 70 - DNA, 18 bp, Artificial sequence
  Synthetic oligonucleotide
gatgaatccactaacaga

SEQ ID NO: 71 - DNA, 18 bp, Artificial sequence
  Synthetic oligonucleotide
tagaggtccttagcctat

SEQ ID NO: 72 - DNA, 18 bp, Artificial sequence
  Synthetic oligonucleotide
atacctgttatagaggtc

SEQ ID NO: 73 - DNA, 18 bp, Artificial sequence
  Synthetic oligonucleotide
ggtggcatacctgttata

SEQ ID NO: 74 - DNA, 18 bp, Artificial sequence
  Synthetic oligonucleotide
cataccccccaggtggca

SEQ ID NO: 75 - DNA, 18 bp, Artificial sequence
  Synthetic oligonucleotide
ggttgccataccccccag

SEQ ID NO: 76 - DNA, 18 bp, Artificial sequence
  Synthetic oligonucleotide
ccatgtggttgccatacc

SEQ ID NO: 77 - DNA, 18 bp, Artificial sequence
  Synthetic oligonucleotide
acgactttgtgtagctgg

SEQ ID NO: 78 - DNA, 18 bp, Artificial sequence
  Synthetic oligonucleotide
caaaccacgactttgtgt

SEQ ID NO: 79 - DNA, 18 bp, Artificial sequence
  Synthetic oligonucleotide
ctcatgcaaaccacgact

SEQ ID NO: 80 - DNA, 18 bp, Artificial sequence
  Synthetic oligonucleotide
agcatgccctcatgcaaa

SEQ ID NO: 81 - DNA, 18 bp, Artificial sequence
  Synthetic oligonucleotide
aagtgcagcatgccctca

SEQ ID NO: 82 - DNA, 18 bp, Artificial sequence
  Synthetic oligonucleotide
gatctctaagtgcagcat

SEQ ID NO: 83 - DNA, 18 bp, Artificial sequence
  Synthetic oligonucleotide
atcacccaattacccctc

SEQ ID NO: 84 - DNA, 18 bp, Artificial sequence
  Synthetic oligonucleotide
ccacttatcacccaatta

SEQ ID NO: 85 - DNA, 18 bp, Artificial sequence
  Synthetic oligonucleotide
gcacctccacttatcacc

SEQ ID NO: 86 - DNA, 18 bp, Artificial sequence
  Synthetic oligonucleotide
tggatttcgcaaaacaag

SEQ ID NO: 87 - DNA, 18 bp, Artificial sequence
  Synthetic oligonucleotide
ataatctacttggtctag

SEQ ID NO: 88 - DNA, 18 bp, Artificial sequence
  Synthetic oligonucleotide
actggcctacccacaaat

SEQ ID NO: 89 - DNA, 18 bp, Artificial sequence
  Synthetic oligonucleotide
agatttactggcctaccc

SEQ ID NO: 90 - DNA, 18 bp, Artificial sequence
  Synthetic oligonucleotide
ttgcacctgctaagattt

SEQ ID NO: 91 - DNA, 18 bp, Artificial sequence
  Synthetic oligonucleotide
tgaagtttgcacctgcta

SEQ ID NO: 92 - DNA, 18 bp, Artificial sequence
  Synthetic oligonucleotide
gtcttctggcggtggagg

SEQ ID NO: 93 - DNA, 18 bp, Artificial sequence
  Synthetic oligonucleotide
aattcagtcttctggcgg

SEQ ID NO: 94 - DNA, 18 bp, Artificial sequence
  Synthetic oligonucleotide
ccgaagatggctaaacaa

SEQ ID NO: 95 - DNA, 18 bp, Artificial sequence
  Synthetic oligonucleotide
tgagagccgaagatggct

SEQ ID NO: 96 - DNA, 18 bp, Artificial sequence
  Synthetic oligonucleotide
accttgctgagagccgaa

SEQ ID NO: 97 - DNA, 18 bp, Artificial sequence
  Synthetic oligonucleotide
tacagtgtcaaccttgct

SEQ ID NO: 98 - DNA, 18 bp, Artificial sequence
  Synthetic oligonucleotide
gcaccacagggtaaaatg

SEQ ID NO: 99 - DNA, 18 bp, Artificial sequence
  Synthetic oligonucleotide
tactgtgcttaggtcatt

SEQ ID NO: 100 - DNA, 18 bp, Artificial sequence
  Synthetic oligonucleotide
gtaaagcttgcactctac

SEQ ID NO: 101 - DNA, 18 bp, Artificial sequence
  Synthetic oligonucleotide
ttacctgtgtaaagcttg

SEQ ID NO: 102 - DNA, 18 bp, Artificial sequence
  Synthetic oligonucleotide
gatagcatccaaactatc

SEQ ID NO: 103 - DNA, 18 bp, Artificial sequence
  Synthetic oligonucleotide
catgcattgatagcatcc

SEQ ID NO: 104 - DNA, 18 bp, Artificial sequence
  Synthetic oligonucleotide
taccactgacatatggtt

SEQ ID NO: 105 - DNA, 18 bp, Artificial sequence
  Synthetic oligonucleotide
aagtgctgcaaactattg

SEQ ID NO: 106 - DNA, 18 bp, Artificial sequence
  Synthetic oligonucleotide
acagtctggctatatacc

SEQ ID NO: 107 - DNA, 18 bp, Artificial sequence
  Synthetic oligonucleotide
gtctgtacagtctggcta

SEQ ID NO: 108 - DNA, 18 bp, Artificial sequence
  Synthetic oligonucleotide
aataggttaagcagtgtg

SEQ ID NO: 109 - DNA, 18 bp, Artificial sequence
  Synthetic oligonucleotide
attgtgatatcaacctga

SEQ ID NO: 110 - DNA, 18 bp, Artificial sequence
  Synthetic oligonucleotide
aatctacaactacccagt

SEQ ID NO: 111 - DNA, 18 bp, Artificial sequence
  Synthetic oligonucleotide
tagtgcaggtactaccag

SEQ ID NO: 112 - DNA, 18 bp, Artificial sequence
  Synthetic oligonucleotide
ttcagttagtgcaggtac

SEQ ID NO: 113 - DNA, 18 bp, Artificial sequence
  Synthetic oligonucleotide
gcactaccttcaattcag

SEQ ID NO: 114 - DNA, 18 bp, Artificial sequence
  Synthetic oligonucleotide
aacaatctagagcagcat

SEQ ID NO: 115 - DNA, 18 bp, Artificial sequence
  Synthetic oligonucleotide
tataagttgactactctg

SEQ ID NO: 116 - DNA, 18 bp, Artificial sequence
  Synthetic oligonucleotide
tcctgatgtaattgacta

SEQ ID NO: 117 - DNA, 18 bp, Artificial sequence
  Synthetic oligonucleotide
agaggagcctatggtttg

SEQ ID NO: 118 - DNA, 18 bp, Artificial sequence
  Synthetic oligonucleotide
agttcacgaatacagttt

SEQ ID NO: 119 - DNA, 18 bp, Artificial sequence
  Synthetic oligonucleotide
gcatgcagttcacgaata

SEQ ID NO: 120 - DNA, 18 bp, Artificial sequence
  Synthetic oligonucleotide
gaacagttccatgagttt

SEQ ID NO: 121 - DNA, 18 bp, Artificial sequence
  Synthetic oligonucleotide
ctggaggaacagttccat

SEQ ID NO: 122 - DNA, 18 bp, Artificial sequence
  Synthetic oligonucleotide
gttaatctggaggaacag

SEQ ID NO: 123 - DNA, 18 bp, Artificial sequence
  Synthetic oligonucleotide
tgaagtgttaatctggag

SEQ ID NO: 124 - DNA, 18 bp, Artificial sequence
  Synthetic oligonucleotide
aacccctgaagtgttaat

SEQ ID NO: 125 - DNA, 18 bp, Artificial sequence
  Synthetic oligonucleotide
ttccataacccctgaagt

SEQ ID NO: 126 - DNA, 18 bp, Artificial sequence
  Synthetic oligonucleotide
tccagcttccataacccc

SEQ ID NO: 127 - DNA, 18 bp, Artificial sequence
  Synthetic oligonucleotide
aagctcagcttcctccag

SEQ ID NO: 128 - DNA, 18 bp, Artificial sequence
  Synthetic oligonucleotide
gtagtaaaagctcagctt

SEQ ID NO: 129 - DNA, 18 bp, Artificial sequence
  Synthetic oligonucleotide
aaagatgtagtaaaagct

SEQ ID NO: 130 - DNA, 18 bp, Artificial sequence
  Synthetic oligonucleotide
aattaccatttattctgc

SEQ ID NO: 131 - DNA, 18 bp, Artificial sequence
  Synthetic oligonucleotide
tgtcatcctgcacatttt

SEQ ID NO: 132 - DNA, 18 bp, Artificial sequence
  Synthetic oligonucleotide
aaggagtcctgttgataa

SEQ ID NO: 133 - DNA, 18 bp, Artificial sequence
  Synthetic oligonucleotide
gacctcctaaaggagtcc

SEQ ID NO: 134 - DNA, 18 bp, Artificial sequence
  Synthetic oligonucleotide
cagtttggcattgacctc

SEQ ID NO: 135 - DNA, 18 bp, Artificial sequence
  Synthetic oligonucleotide
tgtaggcactgaccttaa

SEQ ID NO: 136 - DNA, 18 bp, Artificial sequence
  Synthetic oligonucleotide
tcttattgtaggcactga

SEQ ID NO: 137 - DNA, 18 bp, Artificial sequence
  Synthetic oligonucleotide
taacctcctgtcaaggtc

SEQ ID NO: 138 - DNA, 18 bp, Artificial sequence
  Synthetic oligonucleotide
gaacagtaacctcctgtc

SEQ ID NO: 139 - DNA, 18 bp, Artificial sequence
  Synthetic oligonucleotide
tcagctggtagtgagaac

SEQ ID NO: 140 - DNA, 18 bp, Artificial sequence
  Synthetic oligonucleotide
gtgcatcttatcttcagc

SEQ ID NO: 141 - DNA, 18 bp, Artificial sequence
  Synthetic oligonucleotide
tgactagccattgtgcat

SEQ ID NO: 142 - DNA, 18 bp, Artificial sequence
  Synthetic oligonucleotide
acagtctgactagccatt

SEQ ID NO: 143 - DNA, 18 bp, Artificial sequence
  Synthetic oligonucleotide
gtccctacagtctgacta

SEQ ID NO: 144 - DNA, 18 bp, Artificial sequence
  Synthetic oligonucleotide
aaactggtccctacagtc

SEQ ID NO: 145 - DNA, 18 bp, Artificial sequence
  Synthetic oligonucleotide
tgcaccccttgaaactgg

SEQ ID NO: 146 - DNA, 18 bp, Artificial sequence
  Synthetic oligonucleotide
caggtttgcaccccttga

SEQ ID NO: 147 - DNA, 18 bp, Artificial sequence
  Synthetic oligonucleotide
ggatacaattactacact

SEQ ID NO: 148 - DNA, 18 bp, Artificial sequence
  Synthetic oligonucleotide
agatgaatccactaacag

SEQ ID NO: 149 - DNA, 18 bp, Artificial sequence
  Synthetic oligonucleotide
atagaggtccttagccta

SEQ ID NO: 150 - DNA, 18 bp, Artificial sequence
  Synthetic oligonucleotide
catacctgttatagaggt

SEQ ID NO: 151 - DNA, 18 bp, Artificial sequence
  Synthetic oligonucleotide
aggtggcatacctgttat

SEQ ID NO: 152 - DNA, 18 bp, Artificial sequence
  Synthetic oligonucleotide
ccataccccccaggtggc

SEQ ID NO: 153 - DNA, 18 bp, Artificial sequence
  Synthetic oligonucleotide
tggttgccatacccccca

SEQ ID NO: 154 - DNA, 18 bp, Artificial sequence
  Synthetic oligonucleotide
gccatgtggttgccatac

SEQ ID NO: 155 - DNA, 18 bp, Artificial sequence
  Synthetic oligonucleotide
cacgactttgtgtagctg

SEQ ID NO: 156 - DNA, 18 bp, Artificial sequence
  Synthetic oligonucleotide
gcaaaccacgactttgtg

SEQ ID NO: 157 - DNA, 18 bp, Artificial sequence
  Synthetic oligonucleotide
cctcatgcaaaccacgac

SEQ ID NO: 158 - DNA, 18 bp, Artificial sequence
  Synthetic oligonucleotide
cagcatgccctcatgcaa

SEQ ID NO: 159 - DNA, 18 bp, Artificial sequence
  Synthetic oligonucleotide
taagtgcagcatgccctc

SEQ ID NO: 160 - DNA, 18 bp, Artificial sequence
  Synthetic oligonucleotide
atgatctctaagtgcagc

SEQ ID NO: 161 - DNA, 18 bp, Artificial sequence
  Synthetic oligonucleotide
tatcacccaattacccct

SEQ ID NO: 162 - DNA, 18 bp, Artificial sequence
  Synthetic oligonucleotide
tccacttatcacccaatt

SEQ ID NO: 163 - DNA, 18 bp, Artificial sequence
  Synthetic oligonucleotide
agcacctccacttatcac

SEQ ID NO: 164 - DNA, 18 bp, Artificial sequence
  Synthetic oligonucleotide
gctggatttcgcaaaaca

SEQ ID NO: 165 - DNA, 18 bp, Artificial sequence
  Synthetic oligonucleotide
aataatctacttggtcta

SEQ ID NO: 166 - DNA, 18 bp, Artificial sequence
  Synthetic oligonucleotide
tactggcctacccacaaa

SEQ ID NO: 167 - DNA, 18 bp, Artificial sequence
  Synthetic oligonucleotide
aagatttactggcctacc

SEQ ID NO: 168 - DNA, 18 bp, Artificial sequence
  Synthetic oligonucleotide
tttgcacctgctaagatt

SEQ ID NO: 169 - DNA, 18 bp, Artificial sequence
  Synthetic oligonucleotide
atgaagtttgcacctgct

SEQ ID NO: 170 - DNA, 18 bp, Artificial sequence
  Synthetic oligonucleotide
agtcttctggcggtggag

SEQ ID NO: 171 - DNA, 18 bp, Artificial sequence
  Synthetic oligonucleotide
caattcagtcttctggcg

SEQ ID NO: 172 - DNA, 18 bp, Artificial sequence
  Synthetic oligonucleotide
gccgaagatggctaaaca

SEQ ID NO: 173 - DNA, 18 bp, Artificial sequence
  Synthetic oligonucleotide
ctgagagccgaagatggc

SEQ ID NO: 174 - DNA, 18 bp, Artificial sequence
  Synthetic oligonucleotide
aaccttgctgagagccga

SEQ ID NO: 175 - DNA, 18 bp, Artificial sequence
  Synthetic oligonucleotide
atacagtgtcaaccttgc

SEQ ID NO: 176 - DNA, 18 bp, Artificial sequence
  Synthetic oligonucleotide
tgcaccacagggtaaaat

SEQ ID NO: 177 - DNA, 18 bp, Artificial sequence
  Synthetic oligonucleotide
atactgtgcttaggtcat

SEQ ID NO: 178 - DNA, 18 bp, Artificial sequence
  Synthetic oligonucleotide
tgtaaagcttgcactcta

SEQ ID NO: 179 - DNA, 18 bp, Artificial sequence
  Synthetic oligonucleotide
actatctataaatggtac

SEQ ID NO: 180 - DNA, 18 bp, Artificial sequence
  Synthetic oligonucleotide
tgatagcatccaaactat

SEQ ID NO: 181 - DNA, 18 bp, Artificial sequence
  Synthetic oligonucleotide
acatgcattgatagcatc

SEQ ID NO: 182 - DNA, 18 bp, Artificial sequence
  Synthetic oligonucleotide
ttaccactgacatatggt

SEQ ID NO: 183 - DNA, 18 bp, Artificial sequence
  Synthetic oligonucleotide
aagctgttaaagtgctgc

SEQ ID NO: 184 - DNA, 18 bp, Artificial sequence
  Synthetic oligonucleotide
tacagtctggctatatac

SEQ ID NO: 185 - DNA, 18 bp, Artificial sequence
  Synthetic oligonucleotide
tgtctgtacagtctggct

SEQ ID NO: 186 - DNA, 18 bp, Artificial sequence
  Synthetic oligonucleotide
taataggttaagcagtgt

SEQ ID NO: 187 - DNA, 18 bp, Artificial sequence
  Synthetic oligonucleotide
gattgtgatatcaacctg

SEQ ID NO: 188 - DNA, 18 bp, Artificial sequence
  Synthetic oligonucleotide
gtgaacctattttgctcc

SEQ ID NO: 189 - DNA, 18 bp, Artificial sequence
  Synthetic oligonucleotide
ttagtgcaggtactacca

SEQ ID NO: 190 - DNA, 18 bp, Artificial sequence
  Synthetic oligonucleotide
attcagttagtgcaggta

SEQ ID NO: 191 - DNA, 18 bp, Artificial sequence
  Synthetic oligonucleotide
ataacataagcactacct

SEQ ID NO: 192 - DNA, 18 bp, Artificial sequence
  Synthetic oligonucleotide
gaacaatctagagcagca

SEQ ID NO: 193 - DNA, 18 bp, Artificial sequence
  Synthetic oligonucleotide
ctatataagttgactact

SEQ ID NO: 194 - DNA, 18 bp, Artificial sequence
  Synthetic oligonucleotide
gtcctgatgtaattgact

SEQ ID NO: 195 - DNA, 18 bp, Artificial sequence
  Synthetic oligonucleotide
cgaatacagtttatctaa

SEQ ID NO: 196 - DNA, 18 bp, Artificial sequence
  Synthetic oligonucleotide
cagttcacgaatacagtt

SEQ ID NO: 197 - DNA, 18 bp, Artificial sequence
  Synthetic oligonucleotide
agcatgcagttcacgaat

SEQ ID NO: 198 - DNA, 18 bp, Artificial sequence
  Synthetic oligonucleotide
ggaacagttccatgagtt

SEQ ID NO: 199 - DNA, 18 bp, Artificial sequence
  Synthetic oligonucleotide
tctggaggaacagttcca

SEQ ID NO: 200 - DNA, 18 bp, Artificial sequence
  Synthetic oligonucleotide
tgttaatctggaggaaca

SEQ ID NO: 201 - DNA, 18 bp, Artificial sequence
  Synthetic oligonucleotide
ctgaagtgttaatctgga

SEQ ID NO: 202 - DNA, 18 bp, Artificial sequence
  Synthetic oligonucleotide
taacccctgaagtgttaa

SEQ ID NO: 203 - DNA, 18 bp, Artificial sequence
  Synthetic oligonucleotide
cttccataacccctgaag

SEQ ID NO: 204 - DNA, 18 bp, Artificial sequence
  Synthetic oligonucleotide
ctccagcttccataaccc

SEQ ID NO: 205 - DNA, 18 bp, Artificial sequence
  Synthetic oligonucleotide
aaagctcagcttcctcca

SEQ ID NO: 206 - DNA, 18 bp, Artificial sequence
  Synthetic oligonucleotide
tgtagtaaaagctcagct

SEQ ID NO: 207 - DNA, 18 bp, Artificial sequence
  Synthetic oligonucleotide
cccaaaagatgtagtaaa

SEQ ID NO: 208 - DNA, 18 bp, Artificial sequence
  Synthetic oligonucleotide
gcacattttaattaccat

SEQ ID NO: 209 - DNA, 18 bp, Artificial sequence
  Synthetic oligonucleotide
ttgtcatcctgcacattt

SEQ ID NO: 210 - DNA, 18 bp, Artificial sequence
  Synthetic oligonucleotide
aaaggagtcctgttgata

SEQ ID NO: 211 - DNA, 18 bp, Artificial sequence
  Synthetic oligonucleotide
tgacctcctaaaggagtc

SEQ ID NO: 212 - DNA, 18 bp, Artificial sequence
  Synthetic oligonucleotide
tcagtttggcattgacct

SEQ ID NO: 213 - DNA, 18 bp, Artificial sequence
  Synthetic oligonucleotide
ttgtaggcactgacctta

SEQ ID NO: 214 - DNA, 18 bp, Artificial sequence
  Synthetic oligonucleotide
gtcttattgtaggcactg

SEQ ID NO: 215 - DNA, 18 bp, Artificial sequence
  Synthetic oligonucleotide
gtaacctcctgtcaaggt

SEQ ID NO: 216 - DNA, 18 bp, Artificial sequence
  Synthetic oligonucleotide
gagaacagtaacctcctg

SEQ ID NO: 217 - DNA, 18 bp, Artificial sequence
  Synthetic oligonucleotide
gtcagctggtagtgagaa

SEQ ID NO: 218 - DNA, 18 bp, Artificial sequence
  Synthetic oligonucleotide
ccattgtgcatcttatct

SEQ ID NO: 219 - DNA, 18 bp, Artificial sequence
  Synthetic oligonucleotide
ctgactagccattgtgca

SEQ ID NO: 220 - DNA, 18 bp, Artificial sequence
  Synthetic oligonucleotide
tacagtctgactagccat

SEQ ID NO: 221 - DNA, 18 bp, Artificial sequence
  Synthetic oligonucleotide
ggtccctacagtctgact

SEQ ID NO: 222 - DNA, 18 bp, Artificial sequence
  Synthetic oligonucleotide
gaaactggtccctacagt

SEQ ID NO: 223 - DNA, 18 bp, Artificial sequence
  Synthetic oligonucleotide
ttgcaccccttgaaactg

SEQ ID NO: 224 - DNA, 18 bp, Artificial sequence
  Synthetic oligonucleotide
acaggtttgcaccccttg

SEQ ID NO: 225 - DNA, 18 bp, Artificial sequence
  Synthetic oligonucleotide
tggatacaattactacac

SEQ ID NO: 226 - DNA, 18 bp, Artificial sequence
  Synthetic oligonucleotide
ggtccttagcctatttct

SEQ ID NO: 227 - DNA, 18 bp, Artificial sequence
  Synthetic oligonucleotide
tatagaggtccttagcct

SEQ ID NO: 228 - DNA, 18 bp, Artificial sequence
  Synthetic oligonucleotide
gcatacctgttatagagg

SEQ ID NO: 229 - DNA, 18 bp, Artificial sequence
  Synthetic oligonucleotide
ccccccaggtggcatacc

SEQ ID NO: 230 - DNA, 18 bp, Artificial sequence
  Synthetic oligonucleotide
gccataccccccaggtgg

SEQ ID NO: 231 - DNA, 18 bp, Artificial sequence
  Synthetic oligonucleotide
gtggttgccatacccccc

SEQ ID NO: 232 - DNA, 18 bp, Artificial sequence
  Synthetic oligonucleotide
ggccatgtggttgccata

SEQ ID NO: 233 - DNA, 18 bp, Artificial sequence
  Synthetic oligonucleotide
ccacgactttgtgtagct

SEQ ID NO: 234 - DNA, 18 bp, Artificial sequence
  Synthetic oligonucleotide
tgcaaaccacgactttgt

SEQ ID NO: 235 - DNA, 18 bp, Artificial sequence
  Synthetic oligonucleotide
ccctcatgcaaaccacga

SEQ ID NO: 236 - DNA, 18 bp, Artificial sequence
  Synthetic oligonucleotide
gcagcatgccctcatgca

SEQ ID NO: 237 - DNA, 18 bp, Artificial sequence
  Synthetic oligonucleotide
ctaagtgcagcatgccct

SEQ ID NO: 238 - DNA, 18 bp, Artificial sequence
  Synthetic oligonucleotide
catgcatgatctctaagt

SEQ ID NO: 239 - DNA, 18 bp, Artificial sequence
  Synthetic oligonucleotide
ttatcacccaattacccc

SEQ ID NO: 240 - DNA, 18 bp, Artificial sequence
  Synthetic oligonucleotide
ctccacttatcacccaat

SEQ ID NO: 241 - DNA, 18 bp, Artificial sequence
  Synthetic oligonucleotide
aaagcacctccacttatc

SEQ ID NO: 242 - DNA, 18 bp, Artificial sequence
  Synthetic oligonucleotide
ggctggatttcgcaaaac

SEQ ID NO: 243 - DNA, 18 bp, Artificial sequence
  Synthetic oligonucleotide
gcctacccacaaataatc

SEQ ID NO: 244 - DNA, 18 bp, Artificial sequence
  Synthetic oligonucleotide
ttactggcctacccacaa

SEQ ID NO: 245 - DNA, 18 bp, Artificial sequence
  Synthetic oligonucleotide
taagatttactggcctac

SEQ ID NO: 246 - DNA, 18 bp, Artificial sequence
  Synthetic oligonucleotide
gtttgcacctgctaagat

SEQ ID NO: 247 - DNA, 18 bp, Artificial sequence
  Synthetic oligonucleotide
aatgaagtttgcacctgc

SEQ ID NO: 248 - DNA, 18 bp, Artificial sequence
  Synthetic oligonucleotide
cagtcttctggcggtgga

SEQ ID NO: 249 - DNA, 18 bp, Artificial sequence
  Synthetic oligonucleotide
ggtcaattcagtcttctg

SEQ ID NO: 250 - DNA, 18 bp, Artificial sequence
  Synthetic oligonucleotide
agccgaagatggctaaac

SEQ ID NO: 251 - DNA, 18 bp, Artificial sequence
  Synthetic oligonucleotide
gctgagagccgaagatgg

SEQ ID NO: 252 - DNA, 18 bp, Artificial sequence
  Synthetic oligonucleotide
caaccttgctgagagccg

SEQ ID NO: 253 - DNA, 18 bp, Artificial sequence
  Synthetic oligonucleotide
tatacagtgtcaaccttg

SEQ ID NO: 254 - DNA, 18 bp, Artificial sequence
  Synthetic oligonucleotide
gtgcaccacagggtaaaa

SEQ ID NO: 255 - DNA, 18 bp, Artificial sequence
  Synthetic oligonucleotide
aatactgtgcttaggtca

SEQ ID NO: 256 - DNA, 18 bp, Artificial sequence
  Synthetic oligonucleotide
gtgtaaagcttgcactct

SEQ ID NO: 257 - DNA, 18 bp, Artificial sequence
  Synthetic oligonucleotide
gcatccaaactatctata

SEQ ID NO: 258 - DNA, 18 bp, Artificial sequence
  Synthetic oligonucleotide
ttgatagcatccaaacta

SEQ ID NO: 259 - DNA, 18 bp, Artificial sequence
  Synthetic oligonucleotide
taaacatgcattgatagc

SEQ ID NO: 260 - DNA, 18 bp, Artificial sequence
  Synthetic oligonucleotide
ctttaccactgacatatg

SEQ ID NO: 261 - DNA, 18 bp, Artificial sequence
  Synthetic oligonucleotide
ataccatatgttatccac

SEQ ID NO: 262 - DNA, 18 bp, Artificial sequence
  Synthetic oligonucleotide
gtacagtctggctatata

SEQ ID NO: 263 - DNA, 18 bp, Artificial sequence
  Synthetic oligonucleotide
catgtctgtacagtctgg

SEQ ID NO: 264 - DNA, 18 bp, Artificial sequence
  Synthetic oligonucleotide
ttaataggttaagcagtg

SEQ ID NO: 265 - DNA, 18 bp, Artificial sequence
  Synthetic oligonucleotide
tgattgtgatatcaacct

SEQ ID NO: 266 - DNA, 18 bp, Artificial sequence
  Synthetic oligonucleotide
cgtgaacctattttgctc

SEQ ID NO: 267 - DNA, 18 bp, Artificial sequence
  Synthetic oligonucleotide
gttagtgcaggtactacc

SEQ ID NO: 268 - DNA, 18 bp, Artificial sequence
  Synthetic oligonucleotide
aattcagttagtgcaggt

SEQ ID NO: 269 - DNA, 18 bp, Artificial sequence
  Synthetic oligonucleotide
cataaaccgaagtcagaa

SEQ ID NO: 270 - DNA, 18 bp, Artificial sequence
  Synthetic oligonucleotide
tttagaacaatctagagc

SEQ ID NO: 271 - DNA, 18 bp, Artificial sequence
  Synthetic oligonucleotide
actatataagttgactac

SEQ ID NO: 272 - DNA, 18 bp, Artificial sequence
  Synthetic oligonucleotide
gagcctatggtttgcttc

SEQ ID NO: 273 - DNA, 18 bp, Artificial sequence
  Synthetic oligonucleotide
acgaatacagtttatcta

SEQ ID NO: 274 - DNA, 18 bp, Artificial sequence
  Synthetic oligonucleotide
gcagttcacgaatacagt

SEQ ID NO: 275 - DNA, 18 bp, Artificial sequence
  Synthetic oligonucleotide
cagcatgcagttcacgaa

SEQ ID NO: 276 - DNA, 18 bp, Artificial sequence
  Synthetic oligonucleotide
aggaacagttccatgagt

SEQ ID NO: 277 - DNA, 18 bp, Artificial sequence
  Synthetic oligonucleotide
atctggaggaacagttcc

SEQ ID NO: 278 - DNA, 18 bp, Artificial sequence
  Synthetic oligonucleotide
gtgttaatctggaggaac

SEQ ID NO: 279 - DNA, 18 bp, Artificial sequence
  Synthetic oligonucleotide
cctgaagtgttaatctgg

SEQ ID NO: 280 - DNA, 18 bp, Artificial sequence
  Synthetic oligonucleotide
ataacccctgaagtgtta

SEQ ID NO: 281 - DNA, 18 bp, Artificial sequence
  Synthetic oligonucleotide
gcttccataacccctgaa

SEQ ID NO: 282 - DNA, 18 bp, Artificial sequence
  Synthetic oligonucleotide
cctccagcttccataacc

SEQ ID NO: 283 - DNA, 18 bp, Artificial sequence
  Synthetic oligonucleotide
aaaagctcagcttcctcc

SEQ ID NO: 284 - DNA, 18 bp, Artificial sequence
  Synthetic oligonucleotide
atgtagtaaaagctcagc

SEQ ID NO: 285 - DNA, 18 bp, Artificial sequence
  Synthetic oligonucleotide
ccccaaaagatgtagtaa

SEQ ID NO: 286 - DNA, 18 bp, Artificial sequence
  Synthetic oligonucleotide
ctgcacattttaattacc

SEQ ID NO: 287 - DNA, 18 bp, Artificial sequence
  Synthetic oligonucleotide
cttgtcatcctgcacatt

SEQ ID NO: 288 - DNA, 18 bp, Artificial sequence
  Synthetic oligonucleotide
taaaggagtcctgttgat

SEQ ID NO: 289 - DNA, 18 bp, Artificial sequence
  Synthetic oligonucleotide
ttggcattgacctcctaa

SEQ ID NO: 290 - DNA, 18 bp, Artificial sequence
  Synthetic oligonucleotide
gtcagtttggcattgacc

SEQ ID NO: 291 - DNA, 18 bp, Artificial sequence
  Synthetic oligonucleotide
attgtaggcactgacctt

SEQ ID NO: 292 - DNA, 18 bp, Artificial sequence
  Synthetic oligonucleotide
tgtcttattgtaggcact

SEQ ID NO: 293 - DNA, 18 bp, Artificial sequence
  Synthetic oligonucleotide
agtaacctcctgtcaagg

SEQ ID NO: 294 - DNA, 18 bp, Artificial sequence
  Synthetic oligonucleotide
gtgagaacagtaacctcc

SEQ ID NO: 295 - DNA, 18 bp, Artificial sequence
  Synthetic oligonucleotide
tgtcagctggtagtgaga

SEQ ID NO: 296 - DNA, 18 bp, Artificial sequence
  Synthetic oligonucleotide
gccattgtgcatcttatc

SEQ ID NO: 297 - DNA, 18 bp, Artificial sequence
  Synthetic oligonucleotide
tctgactagccattgtgc

SEQ ID NO: 298 - DNA, 18 bp, Artificial sequence
  Synthetic oligonucleotide
ctacagtctgactagcca

SEQ ID NO: 299 - DNA, 18 bp, Artificial sequence
  Synthetic oligonucleotide
tggtccctacagtctgac

SEQ ID NO: 300 - DNA, 18 bp, Artificial sequence
  Synthetic oligonucleotide
ccccttgaaactggtccc

SEQ ID NO: 301 - DNA, 18 bp, Artificial sequence
  Synthetic oligonucleotide
tttgcaccccttgaaact

SEQ ID NO: 302 - DNA, 18 bp, Artificial sequence
  Synthetic oligonucleotide
cacaggtttgcacccctt

SEQ ID NO: 303 - DNA, 18 bp, Artificial sequence
  Synthetic oligonucleotide
gtggatacaattactaca

SEQ ID NO: 304 - DNA, 18 bp, Artificial sequence
  Synthetic oligonucleotide
aggtccttagcctatttc

SEQ ID NO: 305 - DNA, 18 bp, Artificial sequence
  Synthetic oligonucleotide
cctgttatagaggtcctt

SEQ ID NO: 306 - DNA, 18 bp, Artificial sequence
  Synthetic oligonucleotide
ggcatacctgttatagag

SEQ ID NO: 307 - DNA, 18 bp, Artificial sequence
  Synthetic oligonucleotide
accccccaggtggcatac

SEQ ID NO: 308 - DNA, 18 bp, Artificial sequence
  Synthetic oligonucleotide
tgccataccccccaggtg

SEQ ID NO: 309 - DNA, 18 bp, Artificial sequence
  Synthetic oligonucleotide
tgtggttgccataccccc

SEQ ID NO: 310 - DNA, 18 bp, Artificial sequence
  Synthetic oligonucleotide
gagggccatgtggttgcc

SEQ ID NO: 311 - DNA, 18 bp, Artificial sequence
  Synthetic oligonucleotide
accacgactttgtgtagc

SEQ ID NO: 312 - DNA, 18 bp, Artificial sequence
  Synthetic oligonucleotide
atgcaaaccacgactttg

SEQ ID NO: 313 - DNA, 18 bp, Artificial sequence
  Synthetic oligonucleotide
gccctcatgcaaaccacg

SEQ ID NO: 314 - DNA, 18 bp, Artificial sequence
  Synthetic oligonucleotide
tgcagcatgccctcatgc

SEQ ID NO: 315 - DNA, 18 bp, Artificial sequence
  Synthetic oligonucleotide
tctaagtgcagcatgccc

SEQ ID NO: 316 - DNA, 18 bp, Artificial sequence
  Synthetic oligonucleotide
tcatgcatgatctctaag

SEQ ID NO: 317 - DNA, 18 bp, Artificial sequence
  Synthetic oligonucleotide
cttatcacccaattaccc

SEQ ID NO: 318 - DNA, 18 bp, Artificial sequence
  Synthetic oligonucleotide
cctccacttatcacccaa

SEQ ID NO: 319 - DNA, 18 bp, Artificial sequence
  Synthetic oligonucleotide
tttcgcaaaacaagatca

SEQ ID NO: 320 - DNA, 18 bp, Artificial sequence
  Synthetic oligonucleotide
gggctggatttcgcaaaa

SEQ ID NO: 321 - DNA, 18 bp, Artificial sequence
  Synthetic oligonucleotide
ggcctacccacaaataat

SEQ ID NO: 322 - DNA, 18 bp, Artificial sequence
  Synthetic oligonucleotide
tttactggcctacccaca

SEQ ID NO: 323 - DNA, 18 bp, Artificial sequence
  Synthetic oligonucleotide
tgctaagatttactggcc

SEQ ID NO: 324 - DNA, 18 bp, Artificial sequence
  Synthetic oligonucleotide
agtttgcacctgctaaga

SEQ ID NO: 325 - DNA, 18 bp, Artificial sequence
  Synthetic oligonucleotide
gaatgaagtttgcacctg

SEQ ID NO: 326 - DNA, 18 bp, Artificial sequence
  Synthetic oligonucleotide
tcagtcttctggcggtgg

SEQ ID NO: 327 - DNA, 18 bp, Artificial sequence
  Synthetic oligonucleotide
ggctaaacaaagtgcagg

SEQ ID NO: 328 - DNA, 18 bp, Artificial sequence
  Synthetic oligonucleotide
gagccgaagatggctaaa

SEQ ID NO: 329 - DNA, 18 bp, Artificial sequence
  Synthetic oligonucleotide
ttgctgagagccgaagat

SEQ ID NO: 330 - DNA, 18 bp, Artificial sequence
  Synthetic oligonucleotide
gtcaaccttgctgagagc

SEQ ID NO: 331 - DNA, 18 bp, Artificial sequence
  Synthetic oligonucleotide
atatacagtgtcaacctt

SEQ ID NO: 332 - DNA, 18 bp, Artificial sequence
  Synthetic oligonucleotide
cgtgcaccacagggtaaa

SEQ ID NO: 333 - DNA, 18 bp, Artificial sequence
  Synthetic oligonucleotide
aaatactgtgcttaggtc

SEQ ID NO: 334 - DNA, 18 bp, Artificial sequence
  Synthetic oligonucleotide
cctgtgtaaagcttgcac

SEQ ID NO: 335 - DNA, 18 bp, Artificial sequence
  Synthetic oligonucleotide
agcatccaaactatctat

SEQ ID NO: 336 - DNA, 18 bp, Artificial sequence
  Synthetic oligonucleotide
cattgatagcatccaaac

SEQ ID NO: 337 - DNA, 18 bp, Artificial sequence
  Synthetic oligonucleotide
cagcagcatggtaatata

SEQ ID NO: 338 - DNA, 18 bp, Artificial sequence
  Synthetic oligonucleotide
gctgcaaactattgctta

SEQ ID NO: 339 - DNA, 18 bp, Artificial sequence
  Synthetic oligonucleotide
gtctggctatataccata

SEQ ID NO: 340 - DNA, 18 bp, Artificial sequence
  Synthetic oligonucleotide
tgtacagtctggctatat

SEQ ID NO: 341 - DNA, 18 bp, Artificial sequence
  Synthetic oligonucleotide
acatgtctgtacagtctg

SEQ ID NO: 342 - DNA, 18 bp, Artificial sequence
  Synthetic oligonucleotide
gatatcaacctgaagata

SEQ ID NO: 343 - DNA, 18 bp, Artificial sequence
  Synthetic oligonucleotide
gtgattgtgatatcaacc

SEQ ID NO: 344 - DNA, 18 bp, Artificial sequence
  Synthetic oligonucleotide
gcaggtactaccagaaat

SEQ ID NO: 345 - DNA, 18 bp, Artificial sequence
  Synthetic oligonucleotide
agttagtgcaggtactac

SEQ ID NO: 346 - DNA, 18 bp, Artificial sequence
  Synthetic oligonucleotide
caattcagttagtgcagg

SEQ ID NO: 347 - DNA, 18 bp, Artificial sequence
  Synthetic oligonucleotide
acataaaccgaagtcaga

SEQ ID NO: 348 - DNA, 18 bp, Artificial sequence
  Synthetic oligonucleotide
agcccacattctatttag

SEQ ID NO: 349 - DNA, 18 bp, Artificial sequence
  Synthetic oligonucleotide
gactatataagttgacta

SEQ ID NO: 350 - DNA, 18 bp, Artificial sequence
  Synthetic oligonucleotide
ggagcctatggtttgctt

SEQ ID NO: 351 - DNA, 18 bp, Artificial sequence
  Synthetic oligonucleotide
cacgaatacagtttatct

SEQ ID NO: 352 - DNA, 18 bp, Artificial sequence
  Synthetic oligonucleotide
tgcagttcacgaatacag

SEQ ID NO: 353 - DNA, 18 bp, Artificial sequence
  Synthetic oligonucleotide
ccagcatgcagttcacga

SEQ ID NO: 354 - DNA, 18 bp, Artificial sequence
  Synthetic oligonucleotide
gaggaacagttccatgag

SEQ ID NO: 355 - DNA, 18 bp, Artificial sequence
  Synthetic oligonucleotide
aatctggaggaacagttc

SEQ ID NO: 356 - DNA, 18 bp, Artificial sequence
  Synthetic oligonucleotide
agtgttaatctggaggaa

SEQ ID NO: 357 - DNA, 18 bp, Artificial sequence
  Synthetic oligonucleotide
ccctgaagtgttaatctg

SEQ ID NO: 358 - DNA, 18 bp, Artificial sequence
  Synthetic oligonucleotide
cataacccctgaagtgtt

SEQ ID NO: 359 - DNA, 18 bp, Artificial sequence
  Synthetic oligonucleotide
agcttccataacccctga

SEQ ID NO: 360 - DNA, 18 bp, Artificial sequence
  Synthetic oligonucleotide
tcctccagcttccataac

SEQ ID NO: 361 - DNA, 18 bp, Artificial sequence
  Synthetic oligonucleotide
gtaaaagctcagcttcct

SEQ ID NO: 362 - DNA, 18 bp, Artificial sequence
  Synthetic oligonucleotide
gatgtagtaaaagctcag

SEQ ID NO: 363 - DNA, 18 bp, Artificial sequence
  Synthetic oligonucleotide
ccatttattctgcatatg

SEQ ID NO: 364 - DNA, 18 bp, Artificial sequence
  Synthetic oligonucleotide
cctgcacattttaattac

SEQ ID NO: 365 - DNA, 18 bp, Artificial sequence
  Synthetic oligonucleotide
ggctgtaaacaatttgtc

SEQ ID NO: 366 - DNA, 18 bp, Artificial sequence
  Synthetic oligonucleotide
ctaaaggagtcctgttga

SEQ ID NO: 367 - DNA, 18 bp, Artificial sequence
  Synthetic oligonucleotide
tttggcattgacctccta

SEQ ID NO: 368 - DNA, 18 bp, Artificial sequence
  Synthetic oligonucleotide
agtcagtttggcattgac

SEQ ID NO: 369 - DNA, 18 bp, Artificial sequence
  Synthetic oligonucleotide
tattgtaggcactgacct

SEQ ID NO: 370 - DNA, 18 bp, Artificial sequence
  Synthetic oligonucleotide
ctgtcttattgtaggcac

SEQ ID NO: 371 - DNA, 18 bp, Artificial sequence
  Synthetic oligonucleotide
cagtaacctcctgtcaag

SEQ ID NO: 372 - DNA, 18 bp, Artificial sequence
  Synthetic oligonucleotide
agtgagaacagtaacctc

SEQ ID NO: 373 - DNA, 18 bp, Artificial sequence
  Synthetic oligonucleotide
gtgtcagctggtagtgag

SEQ ID NO: 374 - DNA, 18 bp, Artificial sequence
  Synthetic oligonucleotide
agccattgtgcatcttat

SEQ ID NO: 375 - DNA, 18 bp, Artificial sequence
  Synthetic oligonucleotide
gtctgactagccattgtg

SEQ ID NO: 376 - DNA, 18 bp, Artificial sequence
  Synthetic oligonucleotide
cctacagtctgactagcc

SEQ ID NO: 377 - DNA, 18 bp, Artificial sequence
  Synthetic oligonucleotide
ctggtccctacagtctga

SEQ ID NO: 378 - DNA, 18 bp, Artificial sequence
  Synthetic oligonucleotide
accccttgaaactggtcc

SEQ ID NO: 379 - DNA, 18 bp, Artificial sequence
  Synthetic oligonucleotide
gtttgcaccccttgaaac

SEQ ID NO: 380 - DNA, 18 bp, Artificial sequence
  Synthetic oligonucleotide
tcacaggtttgcacccct

SEQ ID NO: 381 - DNA, 18 bp, Artificial sequence
  Synthetic oligonucleotide
agtggatacaattactac

SEQ ID NO: 382 - DNA, 18 bp, Artificial sequence
  Synthetic oligonucleotide
gaggtccttagcctattt

SEQ ID NO: 383 - DNA, 18 bp, Artificial sequence
  Synthetic oligonucleotide
acctgttatagaggtcct

SEQ ID NO: 384 - DNA, 18 bp, Artificial sequence
  Synthetic oligonucleotide
tggcatacctgttataga

SEQ ID NO: 385 - DNA, 18 bp, Artificial sequence
  Synthetic oligonucleotide
taccccccaggtggcata

SEQ ID NO: 386 - DNA, 18 bp, Artificial sequence
  Synthetic oligonucleotide
ttgccataccccccaggt

SEQ ID NO: 387 - DNA, 18 bp, Artificial sequence
  Synthetic oligonucleotide
atgtggttgccatacccc

SEQ ID NO: 388 - DNA, 18 bp, Artificial sequence
  Synthetic oligonucleotide
ctttgtgtagctgggagg

SEQ ID NO: 389 - DNA, 18 bp, Artificial sequence
  Synthetic oligonucleotide
aaccacgactttgtgtag

SEQ ID NO: 390 - DNA, 18 bp, Artificial sequence
  Synthetic oligonucleotide
catgcaaaccacgacttt

SEQ ID NO: 391 - DNA, 18 bp, Artificial sequence
  Synthetic oligonucleotide
atgccctcatgcaaacca

SEQ ID NO: 392 - DNA, 18 bp, Artificial sequence
  Synthetic oligonucleotide
gtgcagcatgccctcatg

SEQ ID NO: 393 - DNA, 18 bp, Artificial sequence
  Synthetic oligonucleotide
ctctaagtgcagcatgcc

SEQ ID NO: 394 - DNA, 18 bp, Artificial sequence
  Synthetic oligonucleotide
ctcatgcatgatctctaa

SEQ ID NO: 395 - DNA, 18 bp, Artificial sequence
  Synthetic oligonucleotide
acttatcacccaattacc

SEQ ID NO: 396 - DNA, 18 bp, Artificial sequence
  Synthetic oligonucleotide
acctccacttatcaccca

SEQ ID NO: 397 - DNA, 18 bp, Artificial sequence
  Synthetic oligonucleotide
gatttcgcaaaacaagat

SEQ ID NO: 398 - DNA, 18 bp, Artificial sequence
  Synthetic oligonucleotide
aatctacttggtctaggg

SEQ ID NO: 399 - DNA, 18 bp, Artificial sequence
  Synthetic oligonucleotide
tggcctacccacaaataa

SEQ ID NO: 400 - DNA, 18 bp, Artificial sequence
  Synthetic oligonucleotide
atttactggcctacccac

SEQ ID NO: 401 - DNA, 18 bp, Artificial sequence
  Synthetic oligonucleotide
gcacctgctaagatttac

SEQ ID NO: 402 - DNA, 18 bp, Artificial sequence
  Synthetic oligonucleotide
aagtttgcacctgctaag

SEQ ID NO: 403 - DNA, 18 bp, Artificial sequence
  Synthetic oligonucleotide
cataacatttatgactcc

SEQ ID NO: 404 - DNA, 18 bp, Artificial sequence
  Synthetic oligonucleotide
ttcagtcttctggcggtg

SEQ ID NO: 405 - DNA, 18 bp, Artificial sequence
  Synthetic oligonucleotide
gatggctaaacaaagtgc

SEQ ID NO: 406 - DNA, 18 bp, Artificial sequence
  Synthetic oligonucleotide
agagccgaagatggctaa

SEQ ID NO: 407 - DNA, 18 bp, Artificial sequence
  Synthetic oligonucleotide
cttgctgagagccgaaga

SEQ ID NO: 408 - DNA, 18 bp, Artificial sequence
  Synthetic oligonucleotide
agtgtcaaccttgctgag

SEQ ID NO: 409 - DNA, 18 bp, Artificial sequence
  Synthetic oligonucleotide
catatacagtgtcaacct

SEQ ID NO: 410 - DNA, 18 bp, Artificial sequence
  Synthetic oligonucleotide
ctgtgcttaggtcattat

SEQ ID NO: 411 - DNA, 18 bp, Artificial sequence
  Synthetic oligonucleotide
aagcttgcactctacatt

SEQ ID NO: 412 - DNA, 18 bp, Artificial sequence
  Synthetic oligonucleotide
acctgtgtaaagcttgca

SEQ ID NO: 413 - DNA, 18 bp, Artificial sequence
  Synthetic oligonucleotide
tagcatccaaactatcta

SEQ ID NO: 414 - DNA, 18 bp, Artificial sequence
  Synthetic oligonucleotide
gcattgatagcatccaaa

SEQ ID NO: 415 - DNA, 18 bp, Artificial sequence
  Synthetic oligonucleotide
gatacagcagcatggtaa

SEQ ID NO: 416 - DNA, 18 bp, Artificial sequence
  Synthetic oligonucleotide
gtgctgcaaactattgct

SEQ ID NO: 417 - DNA, 18 bp, Artificial sequence
  Synthetic oligonucleotide
agtctggctatataccat

SEQ ID NO: 418 - DNA, 18 bp, Artificial sequence
  Synthetic oligonucleotide
ctgtacagtctggctata

SEQ ID NO: 419 - DNA, 18 bp, Artificial sequence
  Synthetic oligonucleotide
aacatgtctgtacagtct

SEQ ID NO: 420 - DNA, 18 bp, Artificial sequence
  Synthetic oligonucleotide
gtgatatcaacctgaaga

SEQ ID NO: 421 - DNA, 18 bp, Artificial sequence
  Synthetic oligonucleotide
agtgattgtgatatcaac

SEQ ID NO: 422 - DNA, 18 bp, Artificial sequence
  Synthetic oligonucleotide
gtgcaggtactaccagaa

SEQ ID NO: 423 - DNA, 18 bp, Artificial sequence
  Synthetic oligonucleotide
cagttagtgcaggtacta

SEQ ID NO: 424 - DNA, 18 bp, Artificial sequence
  Synthetic oligonucleotide
tcaattcagttagtgcag

SEQ ID NO: 425 - DNA, 18 bp, Artificial sequence
  Synthetic oligonucleotide
aacataaaccgaagtcag

SEQ ID NO: 426 - DNA, 18 bp, Artificial sequence
  Synthetic oligonucleotide
taagttgactactctgtt

SEQ ID NO: 427 - DNA, 18 bp, Artificial sequence
  Synthetic oligonucleotide
ttgactatataagttgac

SEQ ID NO: 428 - DNA, 18 bp, Artificial sequence
  Synthetic oligonucleotide
aggagcctatggtttgct

SEQ ID NO: 429 - DNA, 18 bp, Artificial sequence
  Synthetic oligonucleotide
tcacgaatacagtttatc

SEQ ID NO: 430 - DNA, 18 bp, Artificial sequence
  Synthetic oligonucleotide
atgcagttcacgaataca

SEQ ID NO: 431 - DNA, 18 bp, Artificial sequence
  Synthetic oligonucleotide
tccagcatgcagttcacg

SEQ ID NO: 432 - DNA, 18 bp, Artificial sequence
  Synthetic oligonucleotide
ggaggaacagttccatga

SEQ ID NO: 433 - DNA, 18 bp, Artificial sequence
  Synthetic oligonucleotide
taatctggaggaacagtt

SEQ ID NO: 434 - DNA, 18 bp, Artificial sequence
  Synthetic oligonucleotide
aagtgttaatctggagga

SEQ ID NO: 435 - DNA, 18 bp, Artificial sequence
  Synthetic oligonucleotide
cccctgaagtgttaatct

SEQ ID NO: 436 - DNA, 18 bp, Artificial sequence
  Synthetic oligonucleotide
ccataacccctgaagtgt

SEQ ID NO: 437 - DNA, 18 bp, Artificial sequence
  Synthetic oligonucleotide
cagcttccataacccctg

SEQ ID NO: 438 - DNA, 18 bp, Artificial sequence
  Synthetic oligonucleotide
ttcctccagcttccataa

SEQ ID NO: 439 - DNA, 18 bp, Artificial sequence
  Synthetic oligonucleotide
agtaaaagctcagcttcc

SEQ ID NO: 440 - DNA, 18 bp, Artificial sequence
  Synthetic oligonucleotide
agatgtagtaaaagctca

SEQ ID NO: 441 - DNA, 18 bp, Artificial sequence
  Synthetic oligonucleotide
accatttattctgcatat

SEQ ID NO: 442 - DNA, 18 bp, Artificial sequence
  Synthetic oligonucleotide
tcatcctgcacattttaa

SEQ ID NO: 443 - DNA, 18 bp, Artificial sequence
  Synthetic oligonucleotide
ggagtcctgttgataaaa

SEQ ID NO: 444 - DNA, 18 bp, Artificial sequence
  Synthetic oligonucleotide
cctaaaggagtcctgttg

SEQ ID NO: 445 - DNA, 18 bp, Artificial sequence
  Synthetic oligonucleotide
gtttggcattgacctcct

SEQ ID NO: 446 - DNA, 18 bp, Artificial sequence
  Synthetic oligonucleotide
gaccttaaggagatttgt

SEQ ID NO: 447 - DNA, 18 bp, Artificial sequence
  Synthetic oligonucleotide
ttattgtaggcactgacc

SEQ ID NO: 448 - DNA, 18 bp, Artificial sequence
  Synthetic oligonucleotide
actgtcttattgtaggca

SEQ ID NO: 449 - DNA, 18 bp, Artificial sequence
  Synthetic oligonucleotide
acagtaacctcctgtcaa

SEQ ID NO: 450 - DNA, 18 bp, Artificial sequence
  Synthetic oligonucleotide
tagtgagaacagtaacct

SEQ ID NO: 451 - DNA, 18 bp, Artificial sequence
  Synthetic oligonucleotide
agtgtcagctggtagtga

SEQ ID NO: 452 - DNA, 18 bp, Artificial sequence
  Synthetic oligonucleotide
tagccattgtgcatctta

SEQ ID NO: 453 - DNA, 18 bp, Artificial sequence
  Synthetic oligonucleotide
agtctgactagccattgt

SEQ ID NO: 454 - DNA, 18 bp, Artificial sequence
  Synthetic oligonucleotide
ccctacagtctgactagc

SEQ ID NO: 455 - DNA, 18 bp, Artificial sequence
  Synthetic oligonucleotide
actggtccctacagtctg

SEQ ID NO: 456 - DNA, 18 bp, Artificial sequence
  Synthetic oligonucleotide
caccccttgaaactggtc

SEQ ID NO: 457 - DNA, 18 bp, Artificial sequence
  Synthetic oligonucleotide
ggtttgcaccccttgaaa

SEQ ID NO: 458 - DNA, 18 bp, Artificial sequence
  Synthetic oligonucleotide
aatcacaggtttgcaccc

SEQ ID NO: 459 - DNA, 18 bp, Artificial sequence
  Synthetic oligonucleotide
aatccactaacagattcc

SEQ ID NO: 460 - DNA, 18 bp, Artificial sequence
  Synthetic oligonucleotide
agaggtccttagcctatt

SEQ ID NO: 461 - DNA, 18 bp, Artificial sequence
  Synthetic oligonucleotide
tacctgttatagaggtcc

SEQ ID NO: 462 - DNA, 18 bp, Artificial sequence
  Synthetic oligonucleotide
gtggcatacctgttatag

SEQ ID NO: 463 - DNA, 18 bp, Artificial sequence
  Synthetic oligonucleotide
ataccccccaggtggcat

SEQ ID NO: 464 - DNA, 18 bp, Artificial sequence
  Synthetic oligonucleotide
gttgccataccccccagg

SEQ ID NO: 465 - DNA, 18 bp, Artificial sequence
  Synthetic oligonucleotide
catgtggttgccataccc

SEQ ID NO: 466 - DNA, 18 bp, Artificial sequence
  Synthetic oligonucleotide
cgactttgtgtagctggg

SEQ ID NO: 467 - DNA, 18 bp, Artificial sequence
  Synthetic oligonucleotide
aaaccacgactttgtgta

SEQ ID NO: 468 - DNA, 18 bp, Artificial sequence
  Synthetic oligonucleotide
tcatgcaaaccacgactt

SEQ ID NO: 469 - DNA, 18 bp, Artificial sequence
  Synthetic oligonucleotide
gcatgccctcatgcaaac

SEQ ID NO: 470 - DNA, 18 bp, Artificial sequence
  Synthetic oligonucleotide
agtgcagcatgccctcat

SEQ ID NO: 471 - DNA, 18 bp, Artificial sequence
  Synthetic oligonucleotide
tctctaagtgcagcatgc

SEQ ID NO: 472 - DNA, 18 bp, Artificial sequence
  Synthetic oligonucleotide
tcacccaattacccctcc

SEQ ID NO: 473 - DNA, 18 bp, Artificial sequence
  Synthetic oligonucleotide
cacttatcacccaattac

SEQ ID NO: 474 - DNA, 18 bp, Artificial sequence
  Synthetic oligonucleotide
cacctccacttatcaccc

SEQ ID NO: 475 - DNA, 18 bp, Artificial sequence
  Synthetic oligonucleotide
ggatttcgcaaaacaaga

SEQ ID NO: 476 - DNA, 18 bp, Artificial sequence
  Synthetic oligonucleotide
taatctacttggtctagg

SEQ ID NO: 477 - DNA, 18 bp, Artificial sequence
  Synthetic oligonucleotide
ctggcctacccacaaata

SEQ ID NO: 478 - DNA, 18 bp, Artificial sequence
  Synthetic oligonucleotide
gatttactggcctaccca

SEQ ID NO: 479 - DNA, 18 bp, Artificial sequence
  Synthetic oligonucleotide
tgcacctgctaagattta

SEQ ID NO: 480 - DNA, 18 bp, Artificial sequence
  Synthetic oligonucleotide
gaagtttgcacctgctaa

SEQ ID NO: 481 - DNA, 18 bp, Artificial sequence
  Synthetic oligonucleotide
cttctggcggtggagggt

SEQ ID NO: 482 - DNA, 18 bp, Artificial sequence
  Synthetic oligonucleotide
attcagtcttctggcggt

SEQ ID NO: 483 - DNA, 18 bp, Artificial sequence
  Synthetic oligonucleotide
cgaagatggctaaacaaa

SEQ ID NO: 484 - DNA, 18 bp, Artificial sequence
  Synthetic oligonucleotide
gagagccgaagatggcta

SEQ ID NO: 485 - DNA, 18 bp, Artificial sequence
  Synthetic oligonucleotide
ccttgctgagagccgaag

SEQ ID NO: 486 - DNA, 18 bp, Artificial sequence
  Synthetic oligonucleotide
acagtgtcaaccttgctg

SEQ ID NO: 487 - DNA, 18 bp, Artificial sequence
  Synthetic oligonucleotide
acatatacagtgtcaacc

SEQ ID NO: 488 - DNA, 18 bp, Artificial sequence
  Synthetic oligonucleotide
actgtgcttaggtcatta

SEQ ID NO: 489 - DNA, 18 bp, Artificial sequence
  Synthetic oligonucleotide
taaagcttgcactctaca

SEQ ID NO: 490 - DNA, 18 bp, Artificial sequence
  Synthetic oligonucleotide
tacctgtgtaaagcttgc

SEQ ID NO: 491 - DNA, 18 bp, Artificial sequence
  Synthetic oligonucleotide
atagcatccaaactatct

SEQ ID NO: 492 - DNA, 18 bp, Artificial sequence
  Synthetic oligonucleotide
tgcattgatagcatccaa

SEQ ID NO: 493 - DNA, 18 bp, Artificial sequence
  Synthetic oligonucleotide
agatacagcagcatggta

SEQ ID NO: 494 - DNA, 18 bp, Artificial sequence
  Synthetic oligonucleotide
agtgctgcaaactattgc

SEQ ID NO: 495 - DNA, 18 bp, Artificial sequence
  Synthetic oligonucleotide
cagtctggctatatacca

SEQ ID NO: 496 - DNA, 18 bp, Artificial sequence
  Synthetic oligonucleotide
tctgtacagtctggctat

SEQ ID NO: 497 - DNA, 18 bp, Artificial sequence
  Synthetic oligonucleotide
ataggttaagcagtgtgt

SEQ ID NO: 498 - DNA, 18 bp, Artificial sequence
  Synthetic oligonucleotide
tgtgatatcaacctgaag

SEQ ID NO: 499 - DNA, 18 bp, Artificial sequence
  Synthetic oligonucleotide
atctacaactacccagtc

SEQ ID NO: 500 - DNA, 18 bp, Artificial sequence
  Synthetic oligonucleotide
agtgcaggtactaccaga

SEQ ID NO: 501 - DNA, 18 bp, Artificial sequence
  Synthetic oligonucleotide
tcagttagtgcaggtact

SEQ ID NO: 502 - DNA, 18 bp, Artificial sequence
  Synthetic oligonucleotide
taccttcaattcagttag

SEQ ID NO: 503 - DNA, 18 bp, Artificial sequence
  Synthetic oligonucleotide
ctagagcagcattactcc

SEQ ID NO: 504 - DNA, 18 bp, Artificial sequence
  Synthetic oligonucleotide
ataagttgactactctgt

SEQ ID NO: 505 - DNA, 18 bp, Artificial sequence
  Synthetic oligonucleotide
cctgatgtaattgactat

SEQ ID NO: 506 - DNA, 18 bp, Artificial sequence
  Synthetic oligonucleotide
gaggagcctatggtttgc

SEQ ID NO: 507 - DNA, 18 bp, Artificial sequence
  Synthetic oligonucleotide
gttcacgaatacagttta

SEQ ID NO: 508 - DNA, 18 bp, Artificial sequence
  Synthetic oligonucleotide
catgcagttcacgaatac

SEQ ID NO: 509 - DNA, 18 bp, Artificial sequence
  Synthetic oligonucleotide
atttagcataatagtagc

SEQ ID NO: 510 - DNA, 18 bp, Artificial sequence
  Synthetic oligonucleotide
ttggagcaagattatcct

SEQ ID NO: 511 - DNA, 18 bp, Artificial sequence
  Synthetic oligonucleotide
gtaatacagtacccataa

SEQ ID NO: 512 - DNA, 18 bp, Artificial sequence
  Synthetic oligonucleotide
cataataaagggctcagg

SEQ ID NO: 513 - DNA, 18 bp, Artificial sequence
  Synthetic oligonucleotide
acaaaatagaaatatata

SEQ ID NO: 514 - DNA, 18 bp, Artificial sequence
  Synthetic oligonucleotide
aacacacaaaagaaaatc

SEQ ID NO: 515 - DNA, 18 bp, Artificial sequence
  Synthetic oligonucleotide
ctccaccccatccaagtt

SEQ ID NO: 516 - DNA, 18 bp, Artificial sequence
  Synthetic oligonucleotide
gagcctgaaagaggctga

SEQ ID NO: 517 - DNA, 18 bp, Artificial sequence
  Synthetic oligonucleotide
gaaaaagaaatattaggg

SEQ ID NO: 518 - DNA, 18 bp, Artificial sequence
  Synthetic oligonucleotide
aaagtgggcacatcacct

SEQ ID NO: 519 - DNA, 18 bp, Artificial sequence
  Synthetic oligonucleotide
tacagtacccataataaa

SEQ ID NO: 520 - DNA, 18 bp, Artificial sequence
  Synthetic oligonucleotide
aaaatactacatcttaca

SEQ ID NO: 521 - DNA, 18 bp, Artificial sequence
  Synthetic oligonucleotide
tgatgagagcaaaactcc

SEQ ID NO: 522 - DNA, 18 bp, Artificial sequence
  Synthetic oligonucleotide
tttgaagactaaacacat

SEQ ID NO: 523 - DNA, 18 bp, Artificial sequence
  Synthetic oligonucleotide
caagttggagcaagatta

SEQ ID NO: 524 - DNA, 18 bp, Artificial sequence
  Synthetic oligonucleotide
tttttcaagcagaaaatt

SEQ ID NO: 525 - DNA, 18 bp, Artificial sequence
  Synthetic oligonucleotide
tgaaagaggctgaaatca

SEQ ID NO: 526 - DNA, 18 bp, Artificial sequence
  Synthetic oligonucleotide
aagagcaaagttggaatg

SEQ ID NO: 527 - DNA, 18 bp, Artificial sequence
  Synthetic oligonucleotide
aagactaaacacatttac

SEQ ID NO: 528 - DNA, 18 bp, Artificial sequence
  Synthetic oligonucleotide
aaggaacacacaaaagaa

SEQ ID NO: 529 - DNA, 18 bp, Artificial sequence
  Synthetic oligonucleotide
aatagaaatatatagttt

SEQ ID NO: 530 - DNA, 18 bp, Artificial sequence
  Synthetic oligonucleotide
atattacaaaaagctaac

SEQ ID NO: 531 - DNA, 18 bp, Artificial sequence
  Synthetic oligonucleotide
acacaattaaatgtaaac

SEQ ID NO: 532 - DNA, 18 bp, Artificial sequence
  Synthetic oligonucleotide
aattaaatgtaaacagtt

SEQ ID NO: 533 - DNA, 18 bp, Artificial sequence
  Synthetic oligonucleotide
tcaaaatccaagtgttat

SEQ ID NO: 534 - DNA, 18 bp, Artificial sequence
  Synthetic oligonucleotide
gatagaaaatactacatc

SEQ ID NO: 535 - DNA, 18 bp, Artificial sequence
  Synthetic oligonucleotide
catcttacaaagttttga

SEQ ID NO: 536 - DNA, 18 bp, Artificial sequence
  Synthetic oligonucleotide
ttacaaagttttgaagag

SEQ ID NO: 537 - DNA, 18 bp, Artificial sequence
  Synthetic oligonucleotide
gaatgagcatgaatttca

SEQ ID NO: 538 - DNA, 18 bp, Artificial sequence
  Synthetic oligonucleotide
aaagaaaatcaaaatcca

SEQ ID NO: 539 - DNA, 18 bp, Artificial sequence
  Synthetic oligonucleotide
gtacccataataaagggc

SEQ ID NO: 540 - DNA, 18 bp, Artificial sequence
  Synthetic oligonucleotide
cttggagcctgaaagagg

SEQ ID NO: 541 - DNA, 18 bp, Artificial sequence
  Synthetic oligonucleotide
gcagaaaatttgaagact

SEQ ID NO: 542 - DNA, 18 bp, Artificial sequence
  Synthetic oligonucleotide
aaatgtaaacagtttttc

SEQ ID NO: 543 - DNA, 18 bp, Artificial sequence
  Synthetic oligonucleotide
gagcatgaatttcagttt

SEQ ID NO: 544 - DNA, 18 bp, Artificial sequence
  Synthetic oligonucleotide
ggttgatagaaaatacta

SEQ ID NO: 545 - DNA, 18 bp, Artificial sequence
  Synthetic oligonucleotide
aaaatcaaaatccaagtg

SEQ ID NO: 546 - DNA, 18 bp, Artificial sequence
  Synthetic oligonucleotide
agattatcctatacaaaa

SEQ ID NO: 547 - DNA, 18 bp, Artificial sequence
  Synthetic oligonucleotide
aatccaagtgttatatta

SEQ ID NO: 548 - DNA, 18 bp, Artificial sequence
  Synthetic oligonucleotide
cacaaaagaaaatcaaaa

SEQ ID NO: 549 - DNA, 18 bp, Artificial sequence
  Synthetic oligonucleotide
gctaacattgaaaagccc

SEQ ID NO: 550 - DNA, 18 bp, Artificial sequence
  Synthetic oligonucleotide
catccaagttggagcaag

SEQ ID NO: 551 - DNA, 18 bp, Artificial sequence
  Synthetic oligonucleotide
cagtttaggtcttggagc

SEQ ID NO: 552 - DNA, 18 bp, Artificial sequence
  Synthetic oligonucleotide
aaaatttgaagactaaac

SEQ ID NO: 553 - DNA, 18 bp, Artificial sequence
  Synthetic oligonucleotide
atgaatttcagtttaggt

SEQ ID NO: 554 - DNA, 18 bp, Artificial sequence
  Synthetic oligonucleotide
atttcagtttaggtcttg

SEQ ID NO: 555 - DNA, 18 bp, Artificial sequence
  Synthetic oligonucleotide
tactacatcttacaaagt

SEQ ID NO: 556 - DNA, 18 bp, Artificial sequence
  Synthetic oligonucleotide
tgttatattacaaaaagc

SEQ ID NO: 557 - DNA, 18 bp, Artificial sequence
  Synthetic oligonucleotide
tcaagcagaaaatttgaa

SEQ ID NO: 558 - DNA, 18 bp, Artificial sequence
  Synthetic oligonucleotide
tttgaagagcaaagttgg

SEQ ID NO: 559 - DNA, 18 bp, Artificial sequence
  Synthetic oligonucleotide
tgggtgatgagagcaaaa

SEQ ID NO: 560 - DNA, 18 bp, Artificial sequence
  Synthetic oligonucleotide
accttccaatatgcttac

SEQ ID NO: 561 - DNA, 18 bp, Artificial sequence
  Synthetic oligonucleotide
ctatacaaaatagaaata

SEQ ID NO: 562 - DNA, 18 bp, Artificial sequence
  Synthetic oligonucleotide
agcctgggtgatgagagc

SEQ ID NO: 563 - DNA, 18 bp, Artificial sequence
  Synthetic oligonucleotide
aagttttgaagagcaaag

SEQ ID NO: 564 - DNA, 18 bp, Artificial sequence
  Synthetic oligonucleotide
ttattgttaaggaacaca

SEQ ID NO: 565 - DNA, 18 bp, Artificial sequence
  Synthetic oligonucleotide
tatcctatacaaaataga

SEQ ID NO: 566 - DNA, 18 bp, Artificial sequence
  Synthetic oligonucleotide
atttaccttccaatatgc

SEQ ID NO: 567 - DNA, 18 bp, Artificial sequence
  Synthetic oligonucleotide
ctgaaatcaaataaaata

SEQ ID NO: 568 - DNA, 18 bp, Artificial sequence
  Synthetic oligonucleotide
aaaagctaacattgaaaa

SEQ ID NO: 569 - DNA, 18 bp, Artificial sequence
  Synthetic oligonucleotide
agcaagattatcctatac

SEQ ID NO: 570 - DNA, 18 bp, Artificial sequence
  Synthetic oligonucleotide
ctaaacacatttaccttc

SEQ ID NO: 571 - DNA, 18 bp, Artificial sequence
  Synthetic oligonucleotide
acagtttttcaagcagaa

SEQ ID NO: 572 - DNA, 18 bp, Artificial sequence
  Synthetic oligonucleotide
aggagaacaggagaatcg

SEQ ID NO: 573 - DNA, 18 bp, Artificial sequence
  Synthetic oligonucleotide
caagtgttatattacaaa

SEQ ID NO: 574 - DNA, 18 bp, Artificial sequence
  Synthetic oligonucleotide
tgttaaggaacacacaaa

SEQ ID NO: 575 - DNA, 18 bp, Artificial sequence
  Synthetic oligonucleotide
accccatccaagttggag

SEQ ID NO: 576 - DNA, 18 bp, Artificial sequence
  Synthetic oligonucleotide
agaggctgaaatcaaata

SEQ ID NO: 577 - DNA, 18 bp, Artificial sequence
  Synthetic oligonucleotide
caaagttggaatgagcat

SEQ ID NO: 578 - DNA, 18 bp, Artificial sequence
  Synthetic oligonucleotide
aggcaggagaacaggaga

SEQ ID NO: 579 - DNA, 18 bp, Artificial sequence
  Synthetic oligonucleotide
taggtcttggagcctgaa

SEQ ID NO: 580 - DNA, 18 bp, Artificial sequence
  Synthetic oligonucleotide
gttggaatgagcatgaat

SEQ ID NO: 581 - DNA, 18 bp, Artificial sequence
  Synthetic oligonucleotide
gtaaacagtttttcaagc

SEQ ID NO: 582 - DNA, 18 bp, Artificial sequence
  Synthetic oligonucleotide
gaaatatatagtttgtta

SEQ ID NO: 583 - DNA, 18 bp, Artificial sequence
  Synthetic oligonucleotide
taaaataggtttatattt

SEQ ID NO: 584 - DNA, 18 bp, Artificial sequence
  Synthetic oligonucleotide
acacatttaccttccaat

SEQ ID NO: 585 - DNA, 18 bp, Artificial sequence
  Synthetic oligonucleotide
tacaaaaagctaacattg

SEQ ID NO: 586 - DNA, 18 bp, Artificial sequence
  Synthetic oligonucleotide
tcaaataaaataggttta

SEQ ID NO: 587 - DNA, 18 bp, Artificial sequence
  Synthetic oligonucleotide
ccaagttggagcaagatt

SEQ ID NO: 588 - DNA, 18 bp, Artificial sequence
  Synthetic oligonucleotide
cctatacaaaatagaaat

SEQ ID NO: 589 - DNA, 18 bp, Artificial sequence
  Synthetic oligonucleotide
gttattgttaaggaacac

SEQ ID NO: 590 - DNA, 18 bp, Artificial sequence
  Synthetic oligonucleotide
gagcaagattatcctata

SEQ ID NO: 591 - DNA, 18 bp, Artificial sequence
  Synthetic oligonucleotide
aaatccaagtgttatatt

SEQ ID NO: 592 - DNA, 18 bp, Artificial sequence
  Synthetic oligonucleotide
aagattatcctatacaaa

SEQ ID NO: 593 - DNA, 18 bp, Artificial sequence
  Synthetic oligonucleotide
gtgatgagagcaaaactc

SEQ ID NO: 594 - DNA, 18 bp, Artificial sequence
  Synthetic oligonucleotide
gaaaatcaaaatccaagt

SEQ ID NO: 595 - DNA, 18 bp, Artificial sequence
  Synthetic oligonucleotide
ttttgaagagcaaagttg

SEQ ID NO: 596 - DNA, 18 bp, Artificial sequence
  Synthetic oligonucleotide
tacacaattaaatgtaaa

SEQ ID NO: 597 - DNA, 18 bp, Artificial sequence
  Synthetic oligonucleotide
tgagcatgaatttcagtt

SEQ ID NO: 598 - DNA, 18 bp, Artificial sequence
  Synthetic oligonucleotide
catgaatttcagtttagg

SEQ ID NO: 599 - DNA, 18 bp, Artificial sequence
  Synthetic oligonucleotide
tatattacaaaaagctaa

SEQ ID NO: 600 - DNA, 18 bp, Artificial sequence
  Synthetic oligonucleotide
gaagactaaacacattta

SEQ ID NO: 601 - DNA, 18 bp, Artificial sequence
  Synthetic oligonucleotide
cctgaaagaggctgaaat

SEQ ID NO: 602 - DNA, 18 bp, Artificial sequence
  Synthetic oligonucleotide
agaacaggagaatcgctt

SEQ ID NO: 603 - DNA, 18 bp, Artificial sequence
  Synthetic oligonucleotide
caggagaacaggagaatc

SEQ ID NO: 604 - DNA, 18 bp, Artificial sequence
  Synthetic oligonucleotide
cttacaaagttttgaaga

SEQ ID NO: 605 - DNA, 18 bp, Artificial sequence
  Synthetic oligonucleotide
gctgaaatcaaataaaat

SEQ ID NO: 606 - DNA, 18 bp, Artificial sequence
  Synthetic oligonucleotide
ccaagtgttatattacaa

SEQ ID NO: 607 - DNA, 18 bp, Artificial sequence
  Synthetic oligonucleotide
tcagtttaggtcttggag

SEQ ID NO: 608 - DNA, 18 bp, Artificial sequence
  Synthetic oligonucleotide
ttcaagcagaaaatttga

SEQ ID NO: 609 - DNA, 18 bp, Artificial sequence
  Synthetic oligonucleotide
caaagttttgaagagcaa

SEQ ID NO: 610 - DNA, 18 bp, Artificial sequence
  Synthetic oligonucleotide
atcaaaatccaagtgtta

SEQ ID NO: 611 - DNA, 18 bp, Artificial sequence
  Synthetic oligonucleotide
atactacatcttacaaag

SEQ ID NO: 612 - DNA, 18 bp, Artificial sequence
  Synthetic oligonucleotide
ttgttaaggaacacacaa

SEQ ID NO: 613 - DNA, 18 bp, Artificial sequence
  Synthetic oligonucleotide
caaagtgggcacatcacc

SEQ ID NO: 614 - DNA, 18 bp, Artificial sequence
  Synthetic oligonucleotide
tgatagaaaatactacat

SEQ ID NO: 615 - DNA, 18 bp, Artificial sequence
  Synthetic oligonucleotide
acacaaaagaaaatcaaa

SEQ ID NO: 616 - DNA, 18 bp, Artificial sequence
  Synthetic oligonucleotide
gaaaatactacatcttac

SEQ ID NO: 617 - DNA, 18 bp, Artificial sequence
  Synthetic oligonucleotide
gcaaagttggaatgagca

SEQ ID NO: 618 - DNA, 18 bp, Artificial sequence
  Synthetic oligonucleotide
aaaagaaaatcaaaatcc

SEQ ID NO: 619 - DNA, 18 bp, Artificial sequence
  Synthetic oligonucleotide
agaaatatatagtttgtt

SEQ ID NO: 620 - DNA, 18 bp, Artificial sequence
  Synthetic oligonucleotide
ttaggtcttggagcctga

SEQ ID NO: 621 - DNA, 18 bp, Artificial sequence
  Synthetic oligonucleotide
ggagcctgaaagaggctg

SEQ ID NO: 622 - DNA, 18 bp, Artificial sequence
  Synthetic oligonucleotide
tacaaaatagaaatatat

SEQ ID NO: 623 - DNA, 18 bp, Artificial sequence
  Synthetic oligonucleotide
taaggaacacacaaaaga

SEQ ID NO: 624 - DNA, 18 bp, Artificial sequence
  Synthetic oligonucleotide
gtcttggagcctgaaaga

SEQ ID NO: 625 - DNA, 18 bp, Artificial sequence
  Synthetic oligonucleotide
ttatcctatacaaaatag

SEQ ID NO: 626 - DNA, 18 bp, Artificial sequence
  Synthetic oligonucleotide
atttgaagactaaacaca

SEQ ID NO: 627 - DNA, 18 bp, Artificial sequence
  Synthetic oligonucleotide
aacacatttaccttccaa

SEQ ID NO: 628 - DNA, 18 bp, Artificial sequence
  Synthetic oligonucleotide
caccccatccaagttgga

SEQ ID NO: 629 - DNA, 18 bp, Artificial sequence
  Synthetic oligonucleotide
gaagagcaaagttggaat

SEQ ID NO: 630 - DNA, 18 bp, Artificial sequence
  Synthetic oligonucleotide
agaaaaagaaatattagg

SEQ ID NO: 631 - DNA, 18 bp, Artificial sequence
  Synthetic oligonucleotide
aaaaagctaacattgaaa

SEQ ID NO: 632 - DNA, 18 bp, Artificial sequence
  Synthetic oligonucleotide
taaatgtaaacagttttt

SEQ ID NO: 633 - DNA, 18 bp, Artificial sequence
  Synthetic oligonucleotide
aataaaataggtttatat

SEQ ID NO: 634 - DNA, 18 bp, Artificial sequence
  Synthetic oligonucleotide
agtacccataataaaggg

SEQ ID NO: 635 - DNA, 18 bp, Artificial sequence
  Synthetic oligonucleotide
tgtaaacagtttttcaag

SEQ ID NO: 636 - DNA, 18 bp, Artificial sequence
  Synthetic oligonucleotide
agctaacattgaaaagcc

SEQ ID NO: 637 - DNA, 18 bp, Artificial sequence
  Synthetic oligonucleotide
gctccaccccatccaagt

SEQ ID NO: 638 - DNA, 18 bp, Artificial sequence
  Synthetic oligonucleotide
actaaacacatttacctt

SEQ ID NO: 639 - DNA, 18 bp, Artificial sequence
  Synthetic oligonucleotide
agttggaatgagcatgaa

SEQ ID NO: 640 - DNA, 18 bp, Artificial sequence
  Synthetic oligonucleotide
aatttcagtttaggtctt

SEQ ID NO: 641 - DNA, 18 bp, Artificial sequence
  Synthetic oligonucleotide
ggaatgagcatgaatttc

SEQ ID NO: 642 - DNA, 18 bp, Artificial sequence
  Synthetic oligonucleotide
atacagtacccataataa

SEQ ID NO: 643 - DNA, 18 bp, Artificial sequence
  Synthetic oligonucleotide
catttaccttccaatatg

SEQ ID NO: 644 - DNA, 18 bp, Artificial sequence
  Synthetic oligonucleotide
ttacaaaaagctaacatt

SEQ ID NO: 645 - DNA, 18 bp, Artificial sequence
  Synthetic oligonucleotide
ccatccaagttggagcaa

SEQ ID NO: 646 - DNA, 18 bp, Artificial sequence
  Synthetic oligonucleotide
ggtaatacagtacccata

SEQ ID NO: 647 - DNA, 18 bp, Artificial sequence
  Synthetic oligonucleotide
gtgttatattacaaaaag

SEQ ID NO: 648 - DNA, 18 bp, Artificial sequence
  Synthetic oligonucleotide
taccttccaatatgctta

SEQ ID NO: 649 - DNA, 18 bp, Artificial sequence
  Synthetic oligonucleotide
gaaaatttgaagactaaa

SEQ ID NO: 650 - DNA, 18 bp, Artificial sequence
  Synthetic oligonucleotide
aggttgatagaaaatact

SEQ ID NO: 651 - DNA, 18 bp, Artificial sequence
  Synthetic oligonucleotide
ccataataaagggctcag

SEQ ID NO: 652 - DNA, 18 bp, Artificial sequence
  Synthetic oligonucleotide
aagaggctgaaatcaaat

SEQ ID NO: 653 - DNA, 18 bp, Artificial sequence
  Synthetic oligonucleotide
caattaaatgtaaacagt

SEQ ID NO: 654 - DNA, 18 bp, Artificial sequence
  Synthetic oligonucleotide
ctgggtgatgagagcaaa

SEQ ID NO: 655 - DNA, 18 bp, Artificial sequence
  Synthetic oligonucleotide
gttggagcaagattatcc

SEQ ID NO: 656 - DNA, 18 bp, Artificial sequence
  Synthetic oligonucleotide
aaatagaaatatatagtt

SEQ ID NO: 657 - DNA, 18 bp, Artificial sequence
  Synthetic oligonucleotide
gaggcaggagaacaggag

SEQ ID NO: 658 - DNA, 18 bp, Artificial sequence
  Synthetic oligonucleotide
atcaaataaaataggttt

SEQ ID NO: 659 - DNA, 18 bp, Artificial sequence
  Synthetic oligonucleotide
aacagtttttcaagcaga

SEQ ID NO: 660 - DNA, 18 bp, Artificial sequence
  Synthetic oligonucleotide
gaacacacaaaagaaaat

SEQ ID NO: 661 - DNA, 18 bp, Artificial sequence
  Synthetic oligonucleotide
agcagaaaatttgaagac

SEQ ID NO: 662 - DNA, 18 bp, Artificial sequence
  Synthetic oligonucleotide
gtttttcaagcagaaaat

SEQ ID NO: 663 - DNA, 18 bp, Artificial sequence
  Synthetic oligonucleotide
acatcttacaaagttttg

SEQ ID NO: 664 - DNA, 18 bp, Artificial sequence
  Synthetic oligonucleotide
cccatccaagttggagca

SEQ ID NO: 665 - DNA, 18 bp, Artificial sequence
  Synthetic oligonucleotide
gggtaatacagtacccat

SEQ ID NO: 666 - DNA, 18 bp, Artificial sequence
  Synthetic oligonucleotide
attatcctatacaaaata

SEQ ID NO: 667 - DNA, 18 bp, Artificial sequence
  Synthetic oligonucleotide
agaaaatcaaaatccaag

SEQ ID NO: 668 - DNA, 18 bp, Artificial sequence
  Synthetic oligonucleotide
ggtcttggagcctgaaag

SEQ ID NO: 669 - DNA, 18 bp, Artificial sequence
  Synthetic oligonucleotide
ggaacacacaaaagaaaa

SEQ ID NO: 670 - DNA, 18 bp, Artificial sequence
  Synthetic oligonucleotide
agaaaatactacatctta

SEQ ID NO: 671 - DNA, 18 bp, Artificial sequence
  Synthetic oligonucleotide
tgaagagcaaagttggaa

SEQ ID NO: 672 - DNA, 18 bp, Artificial sequence
  Synthetic oligonucleotide
gaaatcaaataaaatagg

SEQ ID NO: 673 - DNA, 18 bp, Artificial sequence
  Synthetic oligonucleotide
aatcaaaatccaagtgtt

SEQ ID NO: 674 - DNA, 18 bp, Artificial sequence
  Synthetic oligonucleotide
caaaagaaaatcaaaatc

SEQ ID NO: 675 - DNA, 18 bp, Artificial sequence
  Synthetic oligonucleotide
atacacaattaaatgtaa

SEQ ID NO: 676 - DNA, 18 bp, Artificial sequence
  Synthetic oligonucleotide
agtgttatattacaaaaa

SEQ ID NO: 677 - DNA, 18 bp, Artificial sequence
  Synthetic oligonucleotide
atgagcatgaatttcagt

SEQ ID NO: 678 - DNA, 18 bp, Artificial sequence
  Synthetic oligonucleotide
aagttggaatgagcatga

SEQ ID NO: 679 - DNA, 18 bp, Artificial sequence
  Synthetic oligonucleotide
aagctaacattgaaaagc

SEQ ID NO: 680 - DNA, 18 bp, Artificial sequence
  Synthetic oligonucleotide
gcatgaatttcagtttag

SEQ ID NO: 681 - DNA, 18 bp, Artificial sequence
  Synthetic oligonucleotide
ctacatcttacaaagttt

SEQ ID NO: 682 - DNA, 18 bp, Artificial sequence
  Synthetic oligonucleotide
ttcagtttaggtcttgga

SEQ ID NO: 683 - DNA, 18 bp, Artificial sequence
  Synthetic oligonucleotide
gcaggagaacaggagaat

SEQ ID NO: 684 - DNA, 18 bp, Artificial sequence
  Synthetic oligonucleotide
aaagaggctgaaatcaaa

SEQ ID NO: 685 - DNA, 18 bp, Artificial sequence
  Synthetic oligonucleotide
taacattgaaaagcccaa

SEQ ID NO: 686 - DNA, 18 bp, Artificial sequence
  Synthetic oligonucleotide
cctgggtgatgagagcaa

SEQ ID NO: 687 - DNA, 18 bp, Artificial sequence
  Synthetic oligonucleotide
atacaaaatagaaatata

SEQ ID NO: 688 - DNA, 18 bp, Artificial sequence
  Synthetic oligonucleotide
gaatttcagtttaggtct

SEQ ID NO: 689 - DNA, 18 bp, Artificial sequence
  Synthetic oligonucleotide
cccataataaagggctca

SEQ ID NO: 690 - DNA, 18 bp, Artificial sequence
  Synthetic oligonucleotide
aaggttgatagaaaatac

SEQ ID NO: 691 - DNA, 18 bp, Artificial sequence
  Synthetic oligonucleotide
tgaggcaggagaacagga

SEQ ID NO: 692 - DNA, 18 bp, Artificial sequence
  Synthetic oligonucleotide
tccaagttggagcaagat

SEQ ID NO: 693 - DNA, 18 bp, Artificial sequence
  Synthetic oligonucleotide
caagattatcctatacaa

SEQ ID NO: 694 - DNA, 18 bp, Artificial sequence
  Synthetic oligonucleotide
cagtacccataataaagg

SEQ ID NO: 695 - DNA, 18 bp, Artificial sequence
  Synthetic oligonucleotide
ggctgaaatcaaataaaa

SEQ ID NO: 696 - DNA, 18 bp, Artificial sequence
  Synthetic oligonucleotide
ggagcaagattatcctat

SEQ ID NO: 697 - DNA, 18 bp, Artificial sequence
  Synthetic oligonucleotide
caaaaagctaacattgaa

SEQ ID NO: 698 - DNA, 18 bp, Artificial sequence
  Synthetic oligonucleotide
tgaagactaaacacattt

SEQ ID NO: 699 - DNA, 18 bp, Artificial sequence
  Synthetic oligonucleotide
ttgatagaaaatactaca

SEQ ID NO: 700 - DNA, 18 bp, Artificial sequence
  Synthetic oligonucleotide
tggagcctgaaagaggct

SEQ ID NO: 701 - DNA, 18 bp, Artificial sequence
  Synthetic oligonucleotide
aatttgaagactaaacac

SEQ ID NO: 702 - DNA, 18 bp, Artificial sequence
  Synthetic oligonucleotide
gttttgaagagcaaagtt

SEQ ID NO: 703 - DNA, 18 bp, Artificial sequence
  Synthetic oligonucleotide
aaaatagaaatatatagt

SEQ ID NO: 704 - DNA, 18 bp, Artificial sequence
  Synthetic oligonucleotide
tttaggtcttggagcctg

SEQ ID NO: 705 - DNA, 18 bp, Artificial sequence
  Synthetic oligonucleotide
attacaaaaagctaacat

SEQ ID NO: 706 - DNA, 18 bp, Artificial sequence
  Synthetic oligonucleotide
aaacagtttttcaagcag

SEQ ID NO: 707 - DNA, 18 bp, Artificial sequence
  Synthetic oligonucleotide
ttaccttccaatatgctt

SEQ ID NO: 708 - DNA, 18 bp, Artificial sequence
  Synthetic oligonucleotide
aagcagaaaatttgaaga

SEQ ID NO: 709 - DNA, 18 bp, Artificial sequence
  Synthetic oligonucleotide
acaattaaatgtaaacag

SEQ ID NO: 710 - DNA, 18 bp, Artificial sequence
  Synthetic oligonucleotide
tttcaagcagaaaatttg

SEQ ID NO: 711 - DNA, 18 bp, Artificial sequence
  Synthetic oligonucleotide
ggttattgttaaggaaca

SEQ ID NO: 712 - DNA, 18 bp, Artificial sequence
  Synthetic oligonucleotide
tccaagtgttatattaca

SEQ ID NO: 713 - DNA, 18 bp, Artificial sequence
  Synthetic oligonucleotide
ttatattacaaaaagcta

SEQ ID NO: 714 - DNA, 18 bp, Artificial sequence
  Synthetic oligonucleotide
acatttaccttccaatat

SEQ ID NO: 715 - DNA, 18 bp, Artificial sequence
  Synthetic oligonucleotide
ttaaggaacacacaaaag

SEQ ID NO: 716 - DNA, 18 bp, Artificial sequence
  Synthetic oligonucleotide
cgctccaccccatccaag

SEQ ID NO: 717 - DNA, 18 bp, Artificial sequence
  Synthetic oligonucleotide
cacacaaaagaaaatcaa

SEQ ID NO: 718 - DNA, 18 bp, Artificial sequence
  Synthetic oligonucleotide
tggaatgagcatgaattt

SEQ ID NO: 719 - DNA, 18 bp, Artificial sequence
  Synthetic oligonucleotide
tcttacaaagttttgaag

SEQ ID NO: 720 - DNA, 18 bp, Artificial sequence
  Synthetic oligonucleotide
aatactacatcttacaaa

SEQ ID NO: 721 - DNA, 18 bp, Artificial sequence
  Synthetic oligonucleotide
agcaaagttggaatgagc

SEQ ID NO: 722 - DNA, 18 bp, Artificial sequence
  Synthetic oligonucleotide
ccaccccatccaagttgg

SEQ ID NO: 723 - DNA, 18 bp, Artificial sequence
  Synthetic oligonucleotide
aaacacatttaccttcca

SEQ ID NO: 724 - DNA, 18 bp, Artificial sequence
  Synthetic oligonucleotide
ttaaatgtaaacagtttt

SEQ ID NO: 725 - DNA, 18 bp, Artificial sequence
  Synthetic oligonucleotide
ggtgatgagagcaaaact

SEQ ID NO: 726 - DNA, 18 bp, Artificial sequence
  Synthetic oligonucleotide
aagaaaaagaaatattag

SEQ ID NO: 727 - DNA, 18 bp, Artificial sequence
  Synthetic oligonucleotide
agaaaatttgaagactaa

SEQ ID NO: 728 - DNA, 18 bp, Artificial sequence
  Synthetic oligonucleotide
attgttaaggaacacaca

SEQ ID NO: 729 - DNA, 18 bp, Artificial sequence
  Synthetic oligonucleotide
gcctgaaagaggctgaaa

SEQ ID NO: 730 - DNA, 18 bp, Artificial sequence
  Synthetic oligonucleotide
gagaacaggagaatcgct

SEQ ID NO: 731 - DNA, 18 bp, Artificial sequence
  Synthetic oligonucleotide
tcctatacaaaatagaaa

SEQ ID NO: 732 - DNA, 18 bp, Artificial sequence
  Synthetic oligonucleotide
atgtaaacagtttttcaa

SEQ ID NO: 733 - DNA, 18 bp, Artificial sequence
  Synthetic oligonucleotide
aaaatccaagtgttatat

SEQ ID NO: 734 - DNA, 18 bp, Artificial sequence
  Synthetic oligonucleotide
gactaaacacatttacct

SEQ ID NO: 735 - DNA, 18 bp, Artificial sequence
  Synthetic oligonucleotide
tagaaatatatagtttgt

SEQ ID NO: 736 - DNA, 18 bp, Artificial sequence
  Synthetic oligonucleotide
aatacagtacccataata

SEQ ID NO: 737 - DNA, 18 bp, Artificial sequence
  Synthetic oligonucleotide
agtttttcaagcagaaaa

SEQ ID NO: 738 - DNA, 18 bp, Artificial sequence
  Synthetic oligonucleotide
acaaagttttgaagagca

SEQ ID NO: 739 - DNA, 18 bp, Artificial sequence
  Synthetic oligonucleotide
aaataaaataggtttata

SEQ ID NO: 740 - DNA, 18 bp, Artificial sequence
  Synthetic oligonucleotide
gcgctccaccccatccaa

SEQ ID NO: 741 - DNA, 18 bp, Artificial sequence
  Synthetic oligonucleotide
acagtacccataataaag

SEQ ID NO: 742 - DNA, 18 bp, Artificial sequence
  Synthetic oligonucleotide
tccaccccatccaagttg

SEQ ID NO: 743 - DNA, 18 bp, Artificial sequence
  Synthetic oligonucleotide
acccataataaagggctc

SEQ ID NO: 744 - DNA, 18 bp, Artificial sequence
  Synthetic oligonucleotide
atagaaatatatagtttg

SEQ ID NO: 745 - DNA, 18 bp, Artificial sequence
  Synthetic oligonucleotide
gcaagattatcctataca

SEQ ID NO: 746 - DNA, 18 bp, Artificial sequence
  Synthetic oligonucleotide
agcatgaatttcagttta

SEQ ID NO: 747 - DNA, 18 bp, Artificial sequence
  Synthetic oligonucleotide
ctaacattgaaaagccca

SEQ ID NO: 748 - DNA, 18 bp, Artificial sequence
  Synthetic oligonucleotide
acaaaagaaaatcaaaat

SEQ ID NO: 749 - DNA, 18 bp, Artificial sequence
  Synthetic oligonucleotide
tttaccttccaatatgct

SEQ ID NO: 750 - DNA, 18 bp, Artificial sequence
  Synthetic oligonucleotide
taatacagtacccataat

SEQ ID NO: 751 - DNA, 18 bp, Artificial sequence
  Synthetic oligonucleotide
caaaatccaagtgttata

SEQ ID NO: 752 - DNA, 18 bp, Artificial sequence
  Synthetic oligonucleotide
taaacagtttttcaagca

SEQ ID NO: 753 - DNA, 18 bp, Artificial sequence
  Synthetic oligonucleotide
aaagttggaatgagcatg

SEQ ID NO: 754 - DNA, 18 bp, Artificial sequence
  Synthetic oligonucleotide
aagtgttatattacaaaa

SEQ ID NO: 755 - DNA, 18 bp, Artificial sequence
  Synthetic oligonucleotide
ttgaagagcaaagttgga

SEQ ID NO: 756 - DNA, 18 bp, Artificial sequence
  Synthetic oligonucleotide
aaatcaaaatccaagtgt

SEQ ID NO: 757 - DNA, 18 bp, Artificial sequence
  Synthetic oligonucleotide
aaatactacatcttacaa

SEQ ID NO: 758 - DNA, 18 bp, Artificial sequence
  Synthetic oligonucleotide
caagcagaaaatttgaag

SEQ ID NO: 759 - DNA, 18 bp, Artificial sequence
  Synthetic oligonucleotide
agactaaacacatttacc

SEQ ID NO: 760 - DNA, 18 bp, Artificial sequence
  Synthetic oligonucleotide
tacccataataaagggct

SEQ ID NO: 761 - DNA, 18 bp, Artificial sequence
  Synthetic oligonucleotide
aatgagcatgaatttcag

SEQ ID NO: 762 - DNA, 18 bp, Artificial sequence
  Synthetic oligonucleotide
tccctgtaatcccagttg

SEQ ID NO: 763 - DNA, 18 bp, Artificial sequence
  Synthetic oligonucleotide
aagaaaatcaaaatccaa

SEQ ID NO: 764 - DNA, 18 bp, Artificial sequence
  Synthetic oligonucleotide
cacatttaccttccaata

SEQ ID NO: 765 - DNA, 18 bp, Artificial sequence
  Synthetic oligonucleotide
aggtcttggagcctgaaa

SEQ ID NO: 766 - DNA, 18 bp, Artificial sequence
  Synthetic oligonucleotide
tatacacaattaaatgta

SEQ ID NO: 767 - DNA, 18 bp, Artificial sequence
  Synthetic oligonucleotide
caaaatagaaatatatag

SEQ ID NO: 768 - DNA, 18 bp, Artificial sequence
  Synthetic oligonucleotide
ggcaggagaacaggagaa

SEQ ID NO: 769 - DNA, 18 bp, Artificial sequence
  Synthetic oligonucleotide
atcttacaaagttttgaa

SEQ ID NO: 770 - DNA, 18 bp, Artificial sequence
  Synthetic oligonucleotide
tatacaaaatagaaatat

SEQ ID NO: 771 - DNA, 18 bp, Artificial sequence
  Synthetic oligonucleotide
ttttcaagcagaaaattt

SEQ ID NO: 772 - DNA, 18 bp, Artificial sequence
  Synthetic oligonucleotide
tattacaaaaagctaaca

SEQ ID NO: 773 - DNA, 18 bp, Artificial sequence
  Synthetic oligonucleotide
cacaattaaatgtaaaca

SEQ ID NO: 774 - DNA, 18 bp, Artificial sequence
  Synthetic oligonucleotide
ttggaatgagcatgaatt

SEQ ID NO: 775 - DNA, 18 bp, Artificial sequence
  Synthetic oligonucleotide
aggctgaaatcaaataaa

SEQ ID NO: 776 - DNA, 18 bp, Artificial sequence
  Synthetic oligonucleotide
agcctgaaagaggctgaa

SEQ ID NO: 777 - DNA, 18 bp, Artificial sequence
  Synthetic oligonucleotide
taaacacatttaccttcc

SEQ ID NO: 778 - DNA, 18 bp, Artificial sequence
  Synthetic oligonucleotide
aagttggagcaagattat

SEQ ID NO: 779 - DNA, 18 bp, Artificial sequence
  Synthetic oligonucleotide
aaatttgaagactaaaca

SEQ ID NO: 780 - DNA, 18 bp, Artificial sequence
  Synthetic oligonucleotide
ttggagcctgaaagaggc

SEQ ID NO: 781 - DNA, 18 bp, Artificial sequence
  Synthetic oligonucleotide
gttgatagaaaatactac

SEQ ID NO: 782 - DNA, 18 bp, Artificial sequence
  Synthetic oligonucleotide
tattgttaaggaacacac

SEQ ID NO: 783 - DNA, 18 bp, Artificial sequence
  Synthetic oligonucleotide
gcctgggtgatgagagca

SEQ ID NO: 784 - DNA, 18 bp, Artificial sequence
  Synthetic oligonucleotide
agtttaggtcttggagcc

SEQ ID NO: 785 - DNA, 18 bp, Artificial sequence
  Synthetic oligonucleotide
ggagaacaggagaatcgc

SEQ ID NO: 786 - DNA, 18 bp, Artificial sequence
  Synthetic oligonucleotide
acaaaaagctaacattga

SEQ ID NO: 787 - DNA, 18 bp, Artificial sequence
  Synthetic oligonucleotide
atccaagtgttatattac

SEQ ID NO: 788 - DNA, 18 bp, Artificial sequence
  Synthetic oligonucleotide
gaaggttgatagaaaata

SEQ ID NO: 789 - DNA, 18 bp, Artificial sequence
  Synthetic oligonucleotide
gttaaggaacacacaaaa

SEQ ID NO: 790 - DNA, 18 bp, Artificial sequence
  Synthetic oligonucleotide
tacaaagttttgaagagc

SEQ ID NO: 791 - DNA, 18 bp, Artificial sequence
  Synthetic oligonucleotide
tagaaaatactacatctt

SEQ ID NO: 792 - DNA, 18 bp, Artificial sequence
  Synthetic oligonucleotide
attaaatgtaaacagttt

SEQ ID NO: 793 - DNA, 18 bp, Artificial sequence
  Synthetic oligonucleotide
aggaacacacaaaagaaa

SEQ ID NO: 794 - DNA, 18 bp, Artificial sequence
  Synthetic oligonucleotide
agttttgaagagcaaagt

SEQ ID NO: 795 - DNA, 18 bp, Artificial sequence
  Synthetic oligonucleotide
atcctatacaaaatagaa

SEQ ID NO: 796 - DNA, 18 bp, Artificial sequence
  Synthetic oligonucleotide
gggtgatgagagcaaaac

SEQ ID NO: 797 - DNA, 18 bp, Artificial sequence
  Synthetic oligonucleotide
acacacaaaagaaaatca

SEQ ID NO: 798 - DNA, 18 bp, Artificial sequence
  Synthetic oligonucleotide
cagtttttcaagcagaaa

SEQ ID NO: 799 - DNA, 18 bp, Artificial sequence
  Synthetic oligonucleotide
gaaagaggctgaaatcaa

SEQ ID NO: 800 - DNA, 18 bp, Artificial sequence
  Synthetic oligonucleotide
gattatcctatacaaaat

SEQ ID NO: 801 - DNA, 18 bp, Artificial sequence
  Synthetic oligonucleotide
tgaaatcaaataaaatag

SEQ ID NO: 802 - DNA, 18 bp, Artificial sequence
  Synthetic oligonucleotide
aatgtaaacagtttttca

SEQ ID NO: 803 - DNA, 18 bp, Artificial sequence
  Synthetic oligonucleotide
tttcagtttaggtcttgg

SEQ ID NO: 804 - DNA, 18 bp, Artificial sequence
  Synthetic oligonucleotide
gatgagagcaaaactcca

SEQ ID NO: 805 - DNA, 18 bp, Artificial sequence
  Synthetic oligonucleotide
cagaaaatttgaagacta

SEQ ID NO: 806 - DNA, 18 bp, Artificial sequence
  Synthetic oligonucleotide
tgaatttcagtttaggtc

SEQ ID NO: 807 - DNA, 18 bp, Artificial sequence
  Synthetic oligonucleotide
ttgaagactaaacacatt

SEQ ID NO: 808 - DNA, 18 bp, Artificial sequence
  Synthetic oligonucleotide
aggttattgttaaggaac

SEQ ID NO: 809 - DNA, 18 bp, Artificial sequence
  Synthetic oligonucleotide
gagcaaagttggaatgag

SEQ ID NO: 810 - DNA, 18 bp, Artificial sequence
  Synthetic oligonucleotide
gttatattacaaaaagct

SEQ ID NO: 811 - DNA, 18 bp, Artificial sequence
  Synthetic oligonucleotide
aaagctaacattgaaaag

SEQ ID NO: 812 - DNA, 18 bp, Artificial sequence
  Synthetic oligonucleotide
actacatcttacaaagtt

SEQ ID NO: 813 - DNA, 18 bp, Artificial sequence
  Synthetic oligonucleotide
caaataaaataggtttat

SEQ ID NO: 814 - DNA, 18 bp, Artificial sequence
  Synthetic oligonucleotide
atccaagttggagcaaga

SEQ ID NO: 815 - DNA, 18 bp, Artificial sequence
  Synthetic oligonucleotide
ccccatccaagttggagc

SEQ ID NO: 816 - DNA, 18 bp, Artificial sequence
  Synthetic oligonucleotide
tggagcaagattatccta

SEQ ID NO: 817 - DNA, 18 bp, Artificial sequence
  Synthetic oligonucleotide
gtattttccctactgtgg

SEQ ID NO: 818 - DNA, 18 bp, Artificial sequence
  Synthetic oligonucleotide
ataatgtattttccctac

SEQ ID NO: 819 - DNA, 18 bp, Artificial sequence
  Synthetic oligonucleotide
gggattaggatgtaaata

SEQ ID NO: 820 - DNA, 18 bp, Artificial sequence
  Synthetic oligonucleotide
tttttcaaatgaaattta

SEQ ID NO: 821 - DNA, 18 bp, Artificial sequence
  Synthetic oligonucleotide
ttccctactgtggtgcaa

SEQ ID NO: 822 - DNA, 18 bp, Artificial sequence
  Synthetic oligonucleotide
tgtaaataatgtattttc

SEQ ID NO: 823 - DNA, 18 bp, Artificial sequence
  Synthetic oligonucleotide
tgaaatttaagacaattg

SEQ ID NO: 824 - DNA, 18 bp, Artificial sequence
  Synthetic oligonucleotide
taggatgtaaataatgta

SEQ ID NO: 825 - DNA, 18 bp, Artificial sequence
  Synthetic oligonucleotide
agacaattgaaaagaggg

SEQ ID NO: 826 - DNA, 18 bp, Artificial sequence
  Synthetic oligonucleotide
tcaaatgaaatttaagac

SEQ ID NO: 827 - DNA, 18 bp, Artificial sequence
  Synthetic oligonucleotide
tttaagacaattgaaaag

SEQ ID NO: 828 - DNA, 18 bp, Artificial sequence
  Synthetic oligonucleotide
tccctcaccccactacac

SEQ ID NO: 829 - DNA, 18 bp, Artificial sequence
  Synthetic oligonucleotide
gcaaggattaaaggtagc

SEQ ID NO: 830 - DNA, 18 bp, Artificial sequence
  Synthetic oligonucleotide
caccccactacacataag

SEQ ID NO: 831 - DNA, 18 bp, Artificial sequence
  Synthetic oligonucleotide
ttaaaggtagcaaaaggg

SEQ ID NO: 832 - DNA, 18 bp, Artificial sequence
  Synthetic oligonucleotide
acagtgcaaggattaaag

SEQ ID NO: 833 - DNA, 18 bp, Artificial sequence
  Synthetic oligonucleotide
aagtcacagtgcaaggat

SEQ ID NO: 834 - DNA, 18 bp, Artificial sequence
  Synthetic oligonucleotide
cacataagtcacagtgca

SEQ ID NO: 835 - DNA, 18 bp, Artificial sequence
  Synthetic oligonucleotide
gattaaaggtagcaaaag

SEQ ID NO: 836 - DNA, 18 bp, Artificial sequence
  Synthetic oligonucleotide
cactacacataagtcaca

SEQ ID NO: 837 - DNA, 18 bp, Artificial sequence
  Synthetic oligonucleotide
ttgttattagttagaaat

SEQ ID NO: 838 - DNA, 18 bp, Artificial sequence
  Synthetic oligonucleotide
attagttagaaatctgat

SEQ ID NO: 839 - DNA, 18 bp, Artificial sequence
  Synthetic oligonucleotide
aatatatagtttgttatt

SEQ ID NO: 840 - DNA, 18 bp, Artificial sequence
  Synthetic oligonucleotide
atagtttgttattagtta

SEQ ID NO: 841 - DNA, 18 bp, Artificial sequence
  Synthetic oligonucleotide
ttagaaatctgatatgac

SEQ ID NO: 842 - DNA, 18 bp, Artificial sequence
  Synthetic oligonucleotide
gatatgacagaacatttg

SEQ ID NO: 843 - DNA, 18 bp, Artificial sequence
  Synthetic oligonucleotide
ttcatgatgctctccgtc

SEQ ID NO: 844 - DNA, 18 bp, Artificial sequence
  Synthetic oligonucleotide
catgatgctctccgtctg

SEQ ID NO: 845 - DNA, 18 bp, Artificial sequence
  Synthetic oligonucleotide
tgttcatgatgctctccg

SEQ ID NO: 846 - DNA, 18 bp, Artificial sequence
  Synthetic oligonucleotide
tttgttcatgatgctctc

SEQ ID NO: 847 - DNA, 18 bp, Artificial sequence
  Synthetic oligonucleotide
atttggtgttactttttg

SEQ ID NO: 848 - DNA, 18 bp, Artificial sequence
  Synthetic oligonucleotide
tttttgttcatgatgctc

SEQ ID NO: 849 - DNA, 18 bp, Artificial sequence
  Synthetic oligonucleotide
aacatttggtgttacttt

SEQ ID NO: 850 - DNA, 18 bp, Artificial sequence
  Synthetic oligonucleotide
gacagaacatttggtgtt

SEQ ID NO: 851 - DNA, 18 bp, Artificial sequence
  Synthetic oligonucleotide
aatctgatatgacagaac

SEQ ID NO: 852 - DNA, 18 bp, Artificial sequence
  Synthetic oligonucleotide
atgctctccgtctgtttc

SEQ ID NO: 853 - DNA, 18 bp, Artificial sequence
  Synthetic oligonucleotide
ttcttttgaaaaagaagg

SEQ ID NO: 854 - DNA, 18 bp, Artificial sequence
  Synthetic oligonucleotide
cctatccattaagacttg

SEQ ID NO: 855 - DNA, 18 bp, Artificial sequence
  Synthetic oligonucleotide
ctctccgtctgtttccct

SEQ ID NO: 856 - DNA, 18 bp, Artificial sequence
  Synthetic oligonucleotide
aagacttgagttcttttg

SEQ ID NO: 857 - DNA, 18 bp, Artificial sequence
  Synthetic oligonucleotide
cgtctgtttccctatcca

SEQ ID NO: 858 - DNA, 18 bp, Artificial sequence
  Synthetic oligonucleotide
ccattaagacttgagttc

SEQ ID NO: 859 - DNA, 18 bp, Artificial sequence
  Synthetic oligonucleotide
gtttccctatccattaag

SEQ ID NO: 860 - DNA, 18 bp, Artificial sequence
  Synthetic oligonucleotide
ttgagttcttttgaaaaa

SEQ ID NO: 861 - DNA, 18 bp, Artificial sequence
  Synthetic oligonucleotide
tgatgctctccgtctgtt

SEQ ID NO: 862 - DNA, 18 bp, Artificial sequence
  Synthetic oligonucleotide
tactgtggtgcaataata

SEQ ID NO: 863 - DNA, 18 bp, Artificial sequence
  Synthetic oligonucleotide
gttaggaaattaaaaata

SEQ ID NO: 864 - DNA, 18 bp, Artificial sequence
  Synthetic oligonucleotide
aggtatttaagatttcct

SEQ ID NO: 865 - DNA, 18 bp, Artificial sequence
  Synthetic oligonucleotide
tgcaataatagtaccctt

SEQ ID NO: 866 - DNA, 18 bp, Artificial sequence
  Synthetic oligonucleotide
gatttcctaggttaggaa

SEQ ID NO: 867 - DNA, 18 bp, Artificial sequence
  Synthetic oligonucleotide
aaagaaggtatttaagat

SEQ ID NO: 868 - DNA, 18 bp, Artificial sequence
  Synthetic oligonucleotide
tggtgcaataatagtacc

SEQ ID NO: 869 - DNA, 18 bp, Artificial sequence
  Synthetic oligonucleotide
cctaggttaggaaattaa

SEQ ID NO: 870 - DNA, 18 bp, Artificial sequence
  Synthetic oligonucleotide
tttaagatttcctaggtt

SEQ ID NO: 871 - DNA, 18 bp, Artificial sequence
  Synthetic oligonucleotide
ttgaaaaagaaggtattt

SEQ ID NO: 872 - DNA, 18 bp, Artificial sequence
  Synthetic oligonucleotide
acccttcccaatccctcc

SEQ ID NO: 873 - DNA, 18 bp, Artificial sequence
  Synthetic oligonucleotide
tagtacccttcccaatcc

SEQ ID NO: 874 - DNA, 18 bp, Artificial sequence
  Synthetic oligonucleotide
ataatagtacccttccca

SEQ ID NO: 875 - DNA, 18 bp, Artificial sequence
  Synthetic oligonucleotide
caataatagtacccttcc

SEQ ID NO: 876 - DNA, 18 bp, Artificial sequence
  Synthetic oligonucleotide
tcccaatccctccctcac

SEQ ID NO: 877 - DNA, 18 bp, Artificial sequence
  Synthetic oligonucleotide
atccctccctcaccccac

SEQ ID NO: 878 - DNA, 18 bp, Artificial sequence
  Synthetic oligonucleotide
gtacccttcccaatccct

SEQ ID NO: 879 - DNA, 18 bp, Artificial sequence
  Synthetic oligonucleotide
aatagtacccttcccaat

SEQ ID NO: 880 - DNA, 18 bp, Artificial sequence
  Synthetic oligonucleotide
aaaggggtaatacagtac

SEQ ID NO: 881 - DNA, 18 bp, Artificial sequence
  Synthetic oligonucleotide
ggtagcaaaaggggtaat

SEQ ID NO: 882 - DNA, 18 bp, Artificial sequence
  Synthetic oligonucleotide
caaaaggggtaatacagt

SEQ ID NO: 883 - DNA, 18 bp, Artificial sequence
  Synthetic oligonucleotide
aaggggtaatacagtacc

SEQ ID NO: 884 - DNA, 18 bp, Artificial sequence
  Synthetic oligonucleotide
aaggtagcaaaaggggta

SEQ ID NO: 885 - DNA, 18 bp, Artificial sequence
  Synthetic oligonucleotide
agcaaaaggggtaataca

SEQ ID NO: 886 - DNA, 18 bp, Artificial sequence
  Synthetic oligonucleotide
aggggtaatacagtaccc

SEQ ID NO: 887 - DNA, 18 bp, Artificial sequence
  Synthetic oligonucleotide
ggggtaatacagtaccca

SEQ ID NO: 888 - DNA, 18 bp, Artificial sequence
  Synthetic oligonucleotide
gcaaaaggggtaatacag

SEQ ID NO: 889 - DNA, 18 bp, Artificial sequence
  Synthetic oligonucleotide
aaaggtagcaaaaggggt

SEQ ID NO: 890 - DNA, 20 bp, Artificial sequence
  Synthetic oligonucleotide
aagttggagcaagattatcc

SEQ ID NO: 891 - DNA, 19 bp, Artificial sequence
  Synthetic oligonucleotide
agttggagcaagattatcc

SEQ ID NO: 892 - DNA, 19 bp, Artificial sequence
  Synthetic oligonucleotide
aagttggagcaagattatc
